United States Patent Application Publication US 2026/0258423 A1 - sequence listing, part 39

SEQ ID NO: 301568 - DNA, 83257441 bp, Homo sapiens (residues 1-2,134,807 of 83,257,441)
  source 1..83257441: mol_type = genomic DNA
nnnnnnnnnnnnnnnnnnnnnnnnnnnnnnnnnnnnnnnnnnnnnnnnnnnnnnnnnnnnnnnnnnnnnnnnnnnnnnnnnnnnnnnnnnnnnnnnnnnnnnnnnnnnnnnnnnnnnnnnnnnnnnnnnnnnnnnnnnnnnnnnnnnnnnnnnnnnnnnnnnnnnnnnnnnnnnnnnnnnnnnnnnnnnnnnnnnnnnnnnnnnnnnnnnnnnnnnnnnnnnnnnnnnnnnnnnnnnnnnnnnnnnnnnnnnnnnnnnnnnnnnnnnnnnnnnnnnnnnnnnnnnnnnnnnnnnnnnnnnnnnnnnnnnnnnnnnnnnnnnnnnnnnnnnnnnnnnnnnnnnnnnnnnnnnnnnnnnnnnnnnnnnnnnnnnnnnnnnnnnnnnnnnnnnnnnnnnnnnnnnnnnnnnnnnnnnnnnnnnnnnnnnnnnnnnnnnnnnnnnnnnnnnnnnnnnnnnnnnnnnnnnnnnnnnnnnnnnnnnnnnnnnnnnnnnnnnnnnnnnnnnnnnnnnnnnnnnnnnnnnnnnnnnnnnnnnnnnnnnnnnnnnnnnnnnnnnnnnnnnnnnnnnnnnnnnnnnnnnnnnnnnnnnnnnnnnnnnnnnnnnnnnnnnnnnnnnnnnnnnnnnnnnnnnnnnnnnnnnnnnnnnnnnnnnnnnnnnnnnnnnnnnnnnnnnnnnnnnnnnnnnnnnnnnnnnnnnnnnnnnnnnnnnnnnnnnnnnnnnnnnnnnnnnnnnnnnnnnnnnnnnnnnnnnnnnnnnnnnnnnnnnnnnnnnnnnnnnnnnnnnnnnnnnnnnnnnnnnnnnnnnnnnnnnnnnnnnnnnnnnnnnnnnnnnnnnnnnnnnnnnnnnnnnnnnnnnnnnnnnnnnnnnnnnnnnnnnnnnnnnnnnnnnnnnnnnnnnnnnnnnnnnnnnnnnnnnnnnnnnnnnnnnnnnnnnnnnnnnnnnnnnnnnnnnnnnnnnnnnnnnnnnnnnnnnnnnnnnnnnnnnnnnnnnnnnnnnnnnnnnnnnnnnnnnnnnnnnnnnnnnnnnnnnnnnnnnnnnnnnnnnnnnnnnnnnnnnnnnnnnnnnnnnnnnnnnnnnnnnnnnnnnnnnnnnnnnnnnnnnnnnnnnnnnnnnnnnnnnnnnnnnnnnnnnnnnnnnnnnnnnnnnnnnnnnnnnnnnnnnnnnnnnnnnnnnnnnnnnnnnnnnnnnnnnnnnnnnnnnnnnnnnnnnnnnnnnnnnnnnnnnnnnnnnnnnnnnnnnnnnnnnnnnnnnnnnnnnnnnnnnnnnnnnnnnnnnnnnnnnnnnnnnnnnnnnnnnnnnnnnnnnnnnnnnnnnnnnnnnnnnnnnnnnnnnnnnnnnnnnnnnnnnnnnnnnnnnnnnnnnnnnnnnnnnnnnnnnnnnnnnnnnnnnnnnnnnnnnnnnnnnnnnnnnnnnnnnnnnnnnnnnnnnnnnnnnnnnnnnnnnnnnnnnnnnnnnnnnnnnnnnnnnnnnnnnnnnnnnnnnnnnnnnnnnnnnnnnnnnnnnnnnnnnnnnnnnnnnnnnnnnnnnnnnnnnnnnnnnnnnnnnnnnnnnnnnnnnnnnnnnnnnnnnnnnnnnnnnnnnnnnnnnnnnnnnnnnnnnnnnnnnnnnnnnnnnnnnnnnnnnnnnnnnnnnnnnnnnnnnnnnnnnnnnnnnnnnnnnnnnnnnnnnnnnnnnnnnnnnnnnnnnnnnnnnnnnnnnnnnnnnnnnnnnnnnnnnnnnnnnnnnnnnnnnnnnnnnnnnnnnnnnnnnnnnnnnnnnnnnnnnnnnnnnnnnnnnnnnnnnnnnnnnnnnnnnnnnnnnnnnnnnnnnnnnnnnnnnnnnnnnnnnnnnnnnnnnnnnnnnnnnnnnnnnnnnnnnnnnnnnnnnnnnnnnnnnnnnnnnnnnnnnnnnnnnnnnnnnnnnnnnnnnnnnnnnnnnnnnnnnnnnnnnnnnnnnnnnnnnnnnnnnnnnnnnnnnnnnnnnnnnnnnnnnnnnnnnnnnnnnnnnnnnnnnnnnnnnnnnnnnnnnnnnnnnnnnnnnnnnnnnnnnnnnnnnnnnnnnnnnnnnnnnnnnnnnnnnnnnnnnnnnnnnnnnnnnnnnnnnnnnnnnnnnnnnnnnnnnnnnnnnnnnnnnnnnnnnnnnnnnnnnnnnnnnnnnnnnnnnnnnnnnnnnnnnnnnnnnnnnnnnnnnnnnnnnnnnnnnnnnnnnnnnnnnnnnnnnnnnnnnnnnnnnnnnnnnnnnnnnnnnnnnnnnnnnnnnnnnnnnnnnnnnnnnnnnnnnnnnnnnnnnnnnnnnnnnnnnnnnnnnnnnnnnnnnnnnnnnnnnnnnnnnnnnnnnnnnnnnnnnnnnnnnnnnnnnnnnnnnnnnnnnnnnnnnnnnnnnnnnnnnnnnnnnnnnnnnnnnnnnnnnnnnnnnnnnnnnnnnnnnnnnnnnnnnnnnnnnnnnnnnnnnnnnnnnnnnnnnnnnnnnnnnnnnnnnnnnnnnnnnnnnnnnnnnnnnnnnnnnnnnnnnnnnnnnnnnnnnnnnnnnnnnnnnnnnnnnnnnnnnnnnnnnnnnnnnnnnnnnnnnnnnnnnnnnnnnnnnnnnnnnnnnnnnnnnnnnnnnnnnnnnnnnnnnnnnnnnnnnnnnnnnnnnnnnnnnnnnnnnnnnnnnnnnnnnnnnnnnnnnnnnnnnnnnnnnnnnnnnnnnnnnnnnnnnnnnnnnnnnnnnnnnnnnnnnnnnnnnnnnnnnnnnnnnnnnnnnnnnnnnnnnnnnnnnnnnnnnnnnnnnnnnnnnnnnnnnnnnnnnnnnnnnnnnnnnnnnnnnnnnnnnnnnnnnnnnnnnnnnnnnnnnnnnnnnnnnnnnnnnnnnnnnnnnnnnnnnnnnnnnnnnnnnnnnnnnnnnnnnnnnnnnnnnnnnnnnnnnnnnnnnnnnnnnnnnnnnnnnnnnnnnnnnnnnnnnnnnnnnnnnnnnnnnnnnnnnnnnnnnnnnnnnnnnnnnnnnnnnnnnnnnnnnnnnnnnnnnnnnnnnnnnnnnnnnnnnnnnnnnnnnnnnnnnnnnnnnnnnnnnnnnnnnnnnnnnnnnnnnnnnnnnnnnnnnnnnnnnnnnnnnnnnnnnnnnnnnnnnnnnnnnnnnnnnnnnnnnnnnnnnnnnnnnnnnnnnnnnnnnnnnnnnnnnnnnnnnnnnnnnnnnnnnnnnnnnnnnnnnnnnnnnnnnnnnnnnnnnnnnnnnnnnnnnnnnnnnnnnnnnnnnnnnnnnnnnnnnnnnnnnnnnnnnnnnnnnnnnnnnnnnnnnnnnnnnnnnnnnnnnnnnnnnnnnnnnnnnnnnnnnnnnnnnnnnnnnnnnnnnnnnnnnnnnnnnnnnnnnnnnnnnnnnnnnnnnnnnnnnnnnnnnnnnnnnnnnnnnnnnnnnnnnnnnnnnnnnnnnnnnnnnnnnnnnnnnnnnnnnnnnnnnnnnnnnnnnnnnnnnnnnnnnnnnnnnnnnnnnnnnnnnnnnnnnnnnnnnnnnnnnnnnnnnnnnnnnnnnnnnnnnnnnnnnnnnnnnnnnnnnnnnnnnnnnnnnnnnnnnnnnnnnnnnnnnnnnnnnnnnnnnnnnnnnnnnnnnnnnnnnnnnnnnnnnnnnnnnnnnnnnnnnnnnnnnnnnnnnnnnnnnnnnnnnnnnnnnnnnnnnnnnnnnnnnnnnnnnnnnnnnnnnnnnnnnnnnnnnnnnnnnnnnnnnnnnnnnnnnnnnnnnnnnnnnnnnnnnnnnnnnnnnnnnnnnnnnnnnnnnnnnnnnnnnnnnnnnnnnnnnnnnnnnnnnnnnnnnnnnnnnnnnnnnnnnnnnnnnnnnnnnnnnnnnnnnnnnnnnnnnnnnnnnnnnnnnnnnnnnnnnnnnnnnnnnnnnnnnnnnnnnnnnnnnnnnnnnnnnnnnnnnnnnnnnnnnnnnnnnnnnnnnnnnnnnnnnnnnnnnnnnnnnnnnnnnnnnnnnnnnnnnnnnnnnnnnnnnnnnnnnnnnnnnnnnnnnnnnnnnnnnnnnnnnnnnnnnnnnnnnnnnnnnnnnnnnnnnnnnnnnnnnnnnnnnnnnnnnnnnnnnnnnnnnnnnnnnnnnnnnnnnnnnnnnnnnnnnnnnnnnnnnnnnnnnnnnnnnnnnnnnnnnnnnnnnnnnnnnnnnnnnnnnnnnnnnnnnnnnnnnnnnnnnnnnnnnnnnnnnnnnnnnnnnnnnnnnnnnnnnnnnnnnnnnnnnnnnnnnnnnnnnnnnnnnnnnnnnnnnnnnnnnnnnnnnnnnnnnnnnnnnnnnnnnnnnnnnnnnnnnnnnnnnnnnnnnnnnnnnnnnnnnnnnnnnnnnnnnnnnnnnnnnnnnnnnnnnnnnnnnnnnnnnnnnnnnnnnnnnnnnnnnnnnnnnnnnnnnnnnnnnnnnnnnnnnnnnnnnnnnnnnnnnnnnnnnnnnnnnnnnnnnnnnnnnnnnnnnnnnnnnnnnnnnnnnnnnnnnnnnnnnnnnnnnnnnnnnnnnnnnnnnnnnnnnnnnnnnnnnnnnnnnnnnnnnnnnnnnnnnnnnnnnnnnnnnnnnnnnnnnnnnnnnnnnnnnnnnnnnnnnnnnnnnnnnnnnnnnnnnnnnnnnnnnnnnnnnnnnnnnnnnnnnnnnnnnnnnnnnnnnnnnnnnnnnnnnnnnnnnnnnnnnnnnnnnnnnnnnnnnnnnnnnnnnnnnnnnnnnnnnnnnnnnnnnnnnnnnnnnnnnnnnnnnnnnnnnnnnnnnnnnnnnnnnnnnnnnnnnnnnnnnnnnnnnnnnnnnnnnnnnnnnnnnnnnnnnnnnnnnnnnnnnnnnnnnnnnnnnnnnnnnnnnnnnnnnnnnnnnnnnnnnnnnnnnnnnnnnnnnnnnnnnnnnnnnnnnnnnnnnnnnnnnnnnnnnnnnnnnnnnnnnnnnnnnnnnnnnnnnnnnnnnnnnnnnnnnnnnnnnnnnnnnnnnnnnnnnnnnnnnnnnnnnnnnnnnnnnnnnnnnnnnnnnnnnnnnnnnnnnnnnnnnnnnnnnnnnnnnnnnnnnnnnnnnnnnnnnnnnnnnnnnnnnnnnnnnnnnnnnnnnnnnnnnnnnnnnnnnnnnnnnnnnnnnnnnnnnnnnnnnnnnnnnnnnnnnnnnnnnnnnnnnnnnnnnnnnnnnnnnnnnnnnnnnnnnnnnnnnnnnnnnnnnnnnnnnnnnnnnnnnnnnnnnnnnnnnnnnnnnnnnnnnnnnnnnnnnnnnnnnnnnnnnnnnnnnnnnnnnnnnnnnnnnnnnnnnnnnnnnnnnnnnnnnnnnnnnnnnnnnnnnnnnnnnnnnnnnnnnnnnnnnnnnnnnnnnnnnnnnnnnnnnnnnnnnnnnnnnnnnnnnnnnnnnnnnnnnnnnnnnnnnnnnnnnnnnnnnnnnnnnnnnnnnnnnnnnnnnnnnnnnnnnnnnnnnnnnnnnnnnnnnnnnnnnnnnnnnnnnnnnnnnnnnnnnnnnnnnnnnnnnnnnnnnnnnnnnnnnnnnnnnnnnnnnnnnnnnnnnnnnnnnnnnnnnnnnnnnnnnnnnnnnnnnnnnnnnnnnnnnnnnnnnnnnnnnnnnnnnnnnnnnnnnnnnnnnnnnnnnnnnnnnnnnnnnnnnnnnnnnnnnnnnnnnnnnnnnnnnnnnnnnnnnnnnnnnnnnnnnnnnnnnnnnnnnnnnnnnnnnnnnnnnnnnnnnnnnnnnnnnnnnnnnnnnnnnnnnnnnnnnnnnnnnnnnnnnnnnnnnnnnnnnnnnnnnnnnnnnnnnnnnnnnnnnnnnnnnnnnnnnnnnnnnnnnnnnnnnnnnnnnnnnnnnnnnnnnnnnnnnnnnnnnnnnnnnnnnnnnnnnnnnnnnnnnnnnnnnnnnnnnnnnnnnnnnnnnnnnnnnnnnnnnnnnnnnnnnnnnnnnnnnnnnnnnnnnnnnnnnnnnnnnnnnnnnnnnnnnnnnnnnnnnnnnnnnnnnnnnnnnnnnnnnnnnnnnnnnnnnnnnnnnnnnnnnnnnnnnnnnnnnnnnnnnnnnnnnnnnnnnnnnnnnnnnnnnnnnnnnnnnnnnnnnnnnnnnnnnnnnnnnnnnnnnnnnnnnnnnnnnnnnnnnnnnnnnnnnnnnnnnnnnnnnnnnnnnnnnnnnnnnnnnnnnnnnnnnnnnnnnnnnnnnnnnnnnnnnnnnnnnnnnnnnnnnnnnnnnnnnnnnnnnnnnnnnnnnnnnnnnnnnnnnnnnnnnnnnnnnnnnnnnnnnnnnnnnnnnnnnnnnnnnnnnnnnnnnnnnnnnnnnnnnnnnnnnnnnnnnnnnnnnnnnnnnnnnnnnnnnnnnnnnnnnnnnnnnnnnnnnnnnnnnnnnnnnnnnnnnnnnnnnnnnnnnnnnnnnnnnnnnnnnnnnnnnnnnnnnnnnnnnnnnnnnnnnnnnnnnnnnnnnnnnnnnnnnnnnnnnnnnnnnnnnnnnnnnnnnnnnnnnnnnnnnnnnnnnnnnnnnnnnnnnnnnnnnnnnnnnnnnnnnnnnnnnnnnnnnnnnnnnnnnnnnnnnnnnnnnnnnnnnnnnnnnnnnnnnnnnnnnnnnnnnnnnnnnnnnnnnnnnnnnnnnnnnnnnnnnnnnnnnnnnnnnnnnnnnnnnnnnnnnnnnnnnnnnnnnnnnnnnnnnnnnnnnnnnnnnnnnnnnnnnnnnnnnnnnnnnnnnnnnnnnnnnnnnnnnnnnnnnnnnnnnnnnnnnnnnnnnnnnnnnnnnnnnnnnnnnnnnnnnnnnnnnnnnnnnnnnnnnnnnnnnnnnnnnnnnnnnnnnnnnnnnnnnnnnnnnnnnnnnnnnnnnnnnnnnnnnnnnnnnnnnnnnnnnnnnnnnnnnnnnnnnnnnnnnnnnnnnnnnnnnnnnnnnnnnnnnnnnnnnnnnnnnnnnnnnnnnnnnnnnnnnnnnnnnnnnnnnnnnnnnnnnnnnnnnnnnnnnnnnnnnnnnnnnnnnnnnnnnnnnnnnnnnnnnnnnnnnnnnnnnnnnnnnnnnnnnnnnnnnnnnnnnnnnnnnnnnnnnnnnnnnnnnnnnnnnnnnnnnnnnnnnnnnnnnnnnnnnnnnnnnnnnnnnnnnnnnnnnnnnnnnnnnnnnnnnnnnnnnnnnnnnnnnnnnnnnnnnnnnnnnnnnnnnnnnnnnnnnnnnnnnnnnnnnnnnnnnnnnnnnnnnnnnnnnnnnnnnnnnnnnnnnnnnnnnnnnnnnnnnnnnnnnnnnnnnnnnnnnnnnnnnnnnnnnnnnnnnnnnnnnnnnnnnnnnnnnnnnnnnnnnnnnnnnnnnnnnnnnnnnnnnnnnnnnnnnnnnnnnnnnnnnnnnnnnnnnnnnnnnnnnnnnnnnnnnnnnnnnnnnnnnnnnnnnnnnnnnnnnnnnnnnnnnnnnnnnnnnnnnnnnnnnnnnnnnnnnnnnnnnnnnnnnnnnnnnnnnnnnnnnnnnnnnnnnnnnnnnnnnnnnnnnnnnnnnnnnnnnnnnnnnnnnnnnnnnnnnnnnnnnnnnnnnnnnnnnnnnnnnnnnnnnnnnnnnnnnnnnnnnnnnnnnnnnnnnnnnnnnnnnnnnnnnnnnnnnnnnnnnnnnnnnnnnnnnnnnnnnnnnnnnnnnnnnnnnnnnnnnnnnnnnnnnnnnnnnnnnnnnnnnnnnnnnnnnnnnnnnnnnnnnnnnnnnnnnnnnnnnnnnnnnnnnnnnnnnnnnnnnnnnnnnnnnnnnnnnnnnnnnnnnnnnnnnnnnnnnnnnnnnnnnnnnnnnnnnnnnnnnnnnnnnnnnnnnnnnnnnnnnnnnnnnnnnnnnnnnnnnnnnnnnnnnnnnnnnnnnnnnnnnnnnnnnnnnnnnnnnnnnnnnnnnnnnnnnnnnnnnnnnnnnnnnnnnnnnnnnnnnnnnnnnnnnnnnnnnnnnnnnnnnnnnnnnnnnnnnnnnnnnnnnnnnnnnnnnnnnnnnnnnnnnnnnnnnnnnnnnnnnnnnnnnnnnnnnnnnnnnnnnnnnnnnnnnnnnnnnnnnnnnnnnnnnnnnnnnnnnnnnnnnnnnnnnnnnnnnnnnnnnnnnnnnnnnnnnnnnnnnnnnnnnnnnnnnnnnnnnnnnnnnnnnnnnnnnnnnnnnnnnnnnnnnnnnnnnnnnnnnnnnnnnnnnnnnnnnnnnnnnnnnnnnnnnnnnnnnnnnnnnnnnnnnnnnnnnnnnnnnnnnnnnnnnnnnnnnnnnnnnnnnnnnnnnnnnnnnnnnnnnnnnnnnnnnnnnnnnnnnnnnnnnnnnnnnnnnnnnnnnnnnnnnnnnnnnnnnnnnnnnnnnnnnnnnnnnnnnnnnnnnnnnnnnnnnnnnnnnnnnnnnnnnnnnnnnnnnnnnnnnnnnnnnnnnnnnnnnnnnnnnnnnnnnnnnnnnnnnnnnnnnnnnnnnnnnnnnnnnnnnnnnnnnnnnnnnnnnnnnnnnnnnnnnnnnnnnnnnnnnnnnnnnnnnnnnnnnnnnnnnnnnnnnnnnnnnnnnnnnnnnnnnnnnnnnnnnnnnnnnnnnnnnnnnnnnnnnnnnnnnnnnnnnnnnnnnnnnnnnnnnnnnnnnnnnnnnnnnnnnnnnnnnnnnnnnnnnnnnnnnnnnnnnnnnnnnnnnnnnnnnnnnnnnnnnnnnnnnnnnnnnnnnnnnnnnnnnnnnnnnnnnnnnnnnnnnnnnnnnnnnnnnnnnnnnnnnnnnnnnnnnnnnnnnnnnnnnnnnnnnnnnnnnnnnnnnnnnnnnnnnnnnnnnnnnnnnnnnnnnnnnnnnnnnnnnnnnnnnnnnnnnnnnnnnnnnnnnnnnnnnnnnnnnnnnnnnnnnnnnnnnnnnnnnnnnnnnnnnnnnnnnnnnnnnnnnnnnnnnnnnnnnnnnnnnnnnnnnnnnnnnnnnnnnnnnnnnnnnnnnnnnnnnnnnnnnnnnnnnnnnnnnnnnnnnnnnnnnnnnnnnnnnnnnnnnnnnnnnnnnnnnnnnnnnnnnnnnnnnnnnnnnnnnnnnnnnnnnnnnnnnnnnnnnnnnnnnnnnnnnnnnnnnnnnnnnnnnnnnnnnnnnnnnnnnnnnnnnnnnnnnnnnnnnnnnnnnnnnnnnnnnnnnnnnnnnnnnnnnnnnnnnnnnnnnnnnnnnnnnnnnnnnnnnnnnnnnnnnnnnnnnnnnnnnnnnnnnnnnnnnnnnnnnnnnnnnnnnnnnnnnnnnnnnnnnnnnnnnnnnnnnnnnnnnnnnnnnnnnnnnnnnnnnnnnnnnnnnnnnnnnnnnnnnnnnnnnnnnnnnnnnnnnnnnnnnnnnnnnnnnnnnnnnnnnnnnnnnnnnnnnnnnnnnnnnnnnnnnnnnnnnnnnnnnnnnnnnnnnnnnnnnnnnnnnnnnnnnnnnnnnnnnnnnnnnnnnnnnnnnnnnnnnnnnnnnnnnnnnnnnnnnnnnnnnnnnnnnnnnnnnnnnnnnnnnnnnnnnnnnnnnnnnnnnnnnnnnnnnnnnnnnnnnnnnnnnnnnnnnnnnnnnnnnnnnnnnnnnnnnnnnnnnnnnnnnnnnnnnnnnnnnnnnnnnnnnnnnnnnnnnnnnnnnnnnnnnnnnnnnnnnnnnnnnnnnnnnnnnnnnnnnnnnnnnnnnnnnnnnnnnnnnnnnnnnnnnnnnnnnnnnnnnnnnnnnnnnnnnnnnnnnnnnnnnnnnnnnnnnnnnnnnnnnnnnnnnnnnnnnnnnnnnnnnnnnnnnnnnnnnnnnnnnnnnnnnnnnnnnnnnnnnnnnnnnnnnnnnnnnnnnnnnnnnnnnnnnnnnnnnnnnnnnnnnnnnnnnnnnnnnnnnnnnnnnnnnnnnnnnnnnnnnnnnnnnnnnnnnnnnnnnnnnnnnnnnnnnnnnnnnnnnnnnnnnnnnnnnnnnnnnnnnnnnnnnnnnnnnnnnnnnnnnnnnnnnnnnnnnnnnnnnnnnnnnnnnnnnnnnnnnnnnnnnnnnnnnnnnnnnnnnnnnnnnnnnnnnnnnnnnnnnnnnnnnnnnnnnnnnnnnnnnnnnnnnnnnnnnnnnnnnnnnnnnnnnnnnnnnnnnnnnnnnnnnnnnnnnnnnnnnnnnnnnnnnnnnnnnnnnnnnnnnnnnnnnnnnnnnnnnnnnnnnnnnnnnnnnnnnnnnnnnnnnnnnnnnnnnnnnnnnnnnnnnnnnnnnnnnnnnnnnnnnnnnnnnnnnnnnnnnnnnnnnnnnnnnnnnnnnnnnnnnnnnnnnnnnnnnnnnnnnnnnnnnnnnnnnnnnnnnnnnnnnnnnnnnnnnnnnnnnnnnnnnnnnnnnnnnnnnnnnnnnnnnnnnnnnnnnnnnnnnnnnnnnnnnnnnnnnnnnnnnnnnnnnnnnnnnnnnnnnnnnnnnnnnnnnnnnnnnnnnnnnnnnnnnnnnnnnnnnnnnnnnnnnnnnnnnnnnnnnnnnnnnnnnnnnnnnnnnnnnnnnnnnnnnnnnnnnnnnnnnnnnnnnnnnnnnnnnnnnnnnnnnnnnnnnnnnnnnnnnnnnnnnnnnnnnnnnnnnnnnnnnnnnnnnnnnnnnnnnnnnnnnnnnnnnnnnnnnnnnnnnnnnnnnnnnnnnnnnnnnnnnnnnnnnnnnnnnnnnnnnnnnnnnnnnnnnnnnnnnnnnnnnnnnnnnnnnnnnnnnnnnnnnnnnnnnnnnnnnnnnnnnnnnnnnnnnnnnnnnnnnnnnnnnnnnnnnnnnnnnnnnnnnnnnnnnnnnnnnnnnnnnnnnnnnnnnnnnnnnnnnnnnnnnnnnnnnnnnnnnnnnnnnnnnnnnnnnnnnnnnnnnnnnnnnnnnnnnnnnnnnnnnnnnnnnnnnnnnnnnnnnnnnnnnnnnnnnnnnnnnnnnnnnnnnnnnnnnnnnnnnnnnnnnnnnnnnnnnnnnnnnnnnnnnnnnnnnnnnnnnnnnnnnnnnnnnnnnnnnnnnnnnnnnnnnnnnnnnnnnnnnnnnnnnnnnnnnnnnnnnnnnnnnnnnnnnnnnnnnnnnnnnnnnnnnnnnnnnnnnnnnnnnnnnnnnnnnnnnnnnnnnnnnnnnnnnnnnnnnnnnnnnnnnnnnnnnnnnnnnnnnnnnnnnnnnnnnnnnnnnnnnnnnnnnnnnnnnnnnnnnnnnnnnnnnnnnnnnnnnnnnnnnnnnnnnnnnnnnnnnnnnnnnnnnnnnnnnnnnnnnnnnnnnnnnnnnnnnnnnnnnnnnnnnnnnnnnnnnnnnnnnnnnnnnnnnnnnnnnnnnnnnnnnnnnnnnnnnnnnnnnnnnnnnnnnnnnnnnnnnnnnnnnnnnnnnnnnnnnnnnnnnnnnnnnnnnnnnnnnnnnnnnnnnnnnnnnnnnnnnnnnnnnnnnnnnnnnnnnnnnnnnnnnnnnnnnnnnnnnnnnnnnnnnnnnnnnnnnnnnnnnnnnnnnnnnnnnnnnnnnnnnnnnnnnnnnnnnnnnnnnnnnnnnnnnnnnnnnnnnnnnnnnnnnnnnnnnnnnnnnnnnnnnnnnnnnnnnnnnnnnnnnnnnnnnnnnnnnnnnnnnnnnnnnnnnnnnnnnnnnnnnnnnnnnnnnnnnnnnnnnnnnnnnnnnnnnnnnnnnnnnnnnnnnnnnnnnnnnnnnnnnnnnnnnnnnnnnnnnnnnnnnnnnnnnnnnnnnnnnnnnnnnnnnnnnnnnnnnnnnnnnnnnnnnnnnnnnnnnnnnnnnnnnnnnnnnnnnnnnnnnnnnnnnnnnnnnnnnnnnnnnnnnnnnnnnnnnnnnnnnnnnnnnnnnnnnnnnnnnnnnnnnnnnnnnnnnnnnnnnnnnnnnnnnnnnnnnnnnnnnnnnnnnnnnnnnnnnnnnnnnnnnnnnnnnnnnnnnnnnnnnnnnnnnnnnnnnnnnnnnnnnnnnnnnnnnnnnnnnnnnnnnnnnnnnnnnnnnnnnnnnnnnnnnnnnnnnnnnnnnnnnnnnnnnnnnnnnnnnnnnnnnnnnnnnnnnnnnnnnnnnnnnnnnnnnnnnnnnnnnnnnnnnnnnnnnnnnnnnnnnnnnnnnnnnnnnnnnnnnnnnnnnnnnnnnnnnnnnnnnnnnnnnnnnnnnnnnnnnnnnnnnnnnnnnnnnnnnnnnnnnnnnnnnnnnnnnnnnnnnnnnnnnnnnnnnnnnnnnnnnnnnnnnnnnnnnnnnnnnnnnnnnnnnnnnnnnnnnnnnnnnnnnnnnnnnnnnnnnnnnnnnnnnnnnnnnnnnnnnnnnnnnnnnnnnnnnnnnnnnnnnnnnnnnnnnnnnnnnnnnnnnnnnnnnnnnnnnnnnnnnnnnnnnnnnnnnnnnnnnnnnnnnnnnnnnnnnnnnnnnnnnnnnnnnnnnnnnnnnnnnnnnnnnnnnnnnnnnnnnnnnnnnnnnnnnnnnnnnnnnnnnnnnnnnnnnnnnnnnnnnnnnnnnnnnnnnnnnnnnnnnnnnnnnnnnnnnnnnnnnnnnnnnnnnnnnnnnnnnnnnnnnnnnnnnnnnnnnnnnnnnnnnnnnnnnnnnnnnnnnnnnnnnnnnnnnnnnnnnnnnnnnnnnnnnnnnnnnnnnnnnnnnnnnnnnnnnnnnnnnnnnnnnnnnnnnnnnnnnnnnnnnnnnnnnnnnnnnnnnnnnnnnnnnnnnnnnnnnnnnnnnnnnnnnnnnnnnnnnnnnnnnnnnnnnnnnnnnnnnnnnnnnnnnnnnnnnnnnnnnnnnnnnnnnnnnnnnnnnnnnnnnnnnnnnnnnnnnnnnnnnnnnnnnnnnnnnnnnnnnnnnnnnnnnnnnnnnnnnnnnnnnnnnnnnnnnnnnnnnnnnnnnnnnnnnnnnnnnnnnnnnnnnnnnnnnnnnnnnnnnnnnnnnnnnnnnnnnnnnnnnnnnnnnnnnnnnnnnnnnnnnnnnnnnnnnnnnnnnnnnnnnnnnnnnnnnnnnnnnnnnnnnnnnnnnnnnnnnnnnnnnnnnnnnnnnnnnnnnnnnnnnnnnnnnnnnnnnnnnnnnnnnnnnnnnnnnnnnnnnnnnnnnnnnnnnnnnnnnnnnnnnnnnnnnnnnnnnnnnnnnnnnnnnnnnnnnnnnnnnnnnnnnnnnnnnnnnnnnnnnnnnnnnnnnnnnnnnnnnnnnnnnnnnnnnnnnnnnnnnnnnnnnnnnnnnnnnnnnnnnnnnnnnnnnnnnnnnnnnnnnnnnnnnnnnnnnnnnnnnnnnnnnnnnnnnnnnnnnnnnnnnnnnnnnnnnnnnnnnnnnnnnnnnnnnnnnnnnnnnnnnnnnnnnnnnnnnnnnnnnnnnnnnnnnnnnnnnnnnnnnnnnnnnnnnnnnnnnnnnnnnnnnnnnnnnnnnnnnnnnnnnnnnnnnnnnnnnnnnnnnnnnnnnnnnnnnnnnnnnnnnnnnnnnnnnnnnnnnnnnnnnnnnnnnnnnnnnnnnnnnnnnnnnnnnnnnnnnnnnnnnnnnnnnnnnnnnnnnnnnnnnnnnnnnnnnnnnnnnnnnnnnnnnnnnnnnnnnnnnnnnnnnnnnnnnnnnnnnnnnnnnnnnnnnnnnnnnnnnnnnnnnnnnnnnnnnnnnnnnnnnnnnnnnnnnnnnnnnnnnnnnnnnnnnnnnnnnnnnnnnnnnnnnnnnnnnnnnnnnnnnnnnnnnnnnnnnnnnnnnnnnnnnnnnnnnnnnnnnnnnnnnnnnnnnnnnnnnnnnnnnnnnnnnnnnnnnnnnnnnnnnnnnnnnnnnnnnnnnnnnnnnnnnnnnnnnnnnnnnnnnnnnnnnnnnnnnnnnnnnnnnnnnnnnnnnnnnnnnnnnnnnnnnnnnnnnnnnnnnnnnnnnnnnnnnnnnnnnnnnnnnnnnnnnnnnnnnnnnnnnnnnnnnnnnnnnnnnnnnnnnnnnnnnnnnnnnnnnnnnnnnnnnnnnnnnnnnnnnnnnnnnnnnnnnnnnnnnnnnnnnnnnnnnnnnnnnnnnnnnnnnnnnnnnnnnnnnnnnnnnnnnnnnnnnnnnnnnnnnnnnnnnnnnnnnnnnnnnnnnnnnnnnnnnnnnnnnnnnnnnnnnnnnnnnnnnnnnnnnnnnnnnnnnnnnnnnnnnnnnnnnnnnnnnnnnnnnnnnnnnnnnnnnnnnnnnnnnnnnnnnnnnnnnnnnnnnnnnnnnnnnnnnnnnnnnnnnnnnnnnnnnnnnnnnnnnnnnnnnnnnnnnnnnnnnnnnnnnnnnnnnnnnnnnnnnnnnnnnnnnnnnnnnnnnnnnnnnnnnnnnnnnnnnnnnnnnnnnnnnnnnnnnnnnnnnnnnnnnnnnnnnnnnnnnnnnnnnnnnnnnnnnnnnnnnnnnnnnnnnnnnnnnnnnnnnnnnnnnnnnnnnnnnnnnnnnnnnnnnnnnnnnnnnnnnnnnnnnnnnnnnnnnnnnnnnnnnnnnnnnnnnnnnnnnnnnnnnnnnnnnnnnnnnnnnnnnnnnnnnnnnnnnnnnnnnnnnnnnnnnnnnnnnnnnnnnnnnnnnnnnnnnnnnnnnnnnnnnnnnnnnnnnnnnnnnnnnnnnnnnnnnnnnnnnnnnnnnnnnnnnnnnnnnnnnnnnnnnnnnnnnnnnnnnnnnnnnnnnnnnnnnnnnnnnnnnnnnnnnnnnnnnnnnnnnnnnnnnnnnnnnnnnnnnnnnnnnnnnnnnnnnnnnnnnnnnnnnnnnnnnnnnnnnnnnnnnnnnnnnnnnnnnnnnnnnnnnnnnnnnnnnnnnnnnnnnnnnnnnnnnnnnnnnnnnnnnnnnnnnnnnnnnnnnnnnnnnnnnnnnnnnnnnnnnnnnnnnnnnnnnnnnnnnnnnnnnnnnnnnnnnnnnnnnnnnnnnnnnnnnnnnnnnnnnnnnnnnnnnnnnnnnnnnnnnnnnnnnnnnnnnnnnnnnnnnnnnnnnnnnnnnnnnnnnnnnnnnnnnnnnnnnnnnnnnnnnnnnnnnnnnnnnnnnnnnnnnnnnnnnnnnnnnnnnnnnnnnnnnnnnnnnnnnnnnnnnnnnnnnnnnnnnnnnnnnnnnnnnnnnnnnnnnnnnnnnnnnnnnnnnnnnnnnnnnnnnnnnnnnnnnnnnnnnnnnnnnnnnnnnnnnnnnnnnnnnnnnnnnnnnnnnnnnnnnnnnnnnnnnnnnnnnnnnnnnnnnnnnnnnnnnnnnnnnnnnnnnnnnnnnnnnnnnnnnnnnnnnnnnnnnnnnnnnnnnnnnnnnnnnnnnnnnnnnnnnnnnnnnnnnnnnnnnnnnnnnnnnnnnnnnnnnnnnnnnnnnnnnnnnnnnnnnnnnnnnnnnnnnnnnnnnnnnnnnnnnnnnnnnnnnnnnnnnnnnnnnnnnnnnnnnnnnnnnnnnnnnnnnnnnnnnnnnnnnnnnnnnnnnnnnnnnnnnnnnnnnnnnnnnnnnnnnnnnnnnnnnnnnnnnnnnnnnnnnnnnnnnnnnnnnnnnnnnnnnnnnnnnnnnnnnnnnnnnnnnnnnnnnnnnnnnnnnnnnnnnnnnnnnnnnnnnnnnnnnnnnnnnnnnnnnnnnnnnnnnnnnnnnnnnnnnnnnnnnnnnnnnnnnnnnnnnnnnnnnnnnnnnnnnnnnnnnnnnnnnnnnnnnnnnnnnnnnnnnnnnnnnnnnnnnnnnnnnnnnnnnnnnnnnnnnnnnnnnnnnnnnnnnnnnnnnnnnnnnnnnnnnnnnnnnnnnnnnnnnnnnnnnnnnnnnnnnnnnnnnnnnnnnnnnnnnnnnnnnnnnnnnnnnnnnnnnnnnnnnnnnnnnnnnnnnnnnnnnnnnnnnnnnnnnnnnnnnnnnnnnnnnnnnnnnnnnnnnnnnnnnnnnnnnnnnnnnnnnnnnnnnnnnnnnnnnnnnnnnnnnnnnnnnnnnnnnnnnnnnnnnnnnnnnnnnnnnnnnnnnnnnnnnnnnnnnnnnnnnnnnnnnnnnnnnnnnnnnnnnnnnnnnnnnnnnnnnnnnnnnnnnnnnnnnnnnnnnnnnnnnnnnnnnnnnnnnnnnnnnnnnnnnnnnnnnnnnnnnnnnnnnnnnnnnnnnnnnnnnnnnnnnnnnnnnnnnnnnnnnnnnnnnnnnnnnnnnnnnnnnnnnnnnnnnnnnnnnnnnnnnnnnnnnnnnnnnnnnnnnnnnnnnnnnnnnnnnnnnnnnnnnnnnnnnnnnnnnnnnnnnnnnnnnnnnnnnnnnnnnnnnnnnnnnnnnnnnnnnnnnnnnnnnnnnnnnnnnnnnnnnnnnnnnnnnnnnnnnnnnnnnnnnnnnnnnnnnnnnnnnnnnnnnnnnnnnnnnnnnnnnnnnnnnnnnnnnnnnnnnnnnnnnnnnnnnnnnnnnnnnnnnnnnnnnnnnnnnnnnnnnnnnnnnnnnnnnnnnnnnnnnnnnnnnnnnnnnnnnnnnnnnnnnnnnnnnnnnnnnnnnnnnnnnnnnnnnnnnnnnnnnnnnnnnnnnnnnnnnnnnnnnnnnnnnnnnnnnnnnnnnnnnnnnnnnnnnnnnnnnnnnnnnnnnnnnnnnnnnnnnnnnnnnnnnnnnnnnnnnnnnnnnnnnnnnnnnnnnnnnnnnnnnnnnnnnnnnnnnnnnnnnnnnnnnnnnnnnnnnnnnnnnnnnnnnnnnnnnnnnnnnnnnnnnnnnnnnnnnnnnnnnnnnnnnnnnnnnnnnnnnnnnnnnnnnnnnnnnnnnnnnnnnnnnnnnnnnnnnnnnnnnnnnnnnnnnnnnnnnnnnnnnnnnnnnnnnnnnnnnnnnnnnnnnnnnnnnnnnnnnnnnnnnnnnnnnnnnnnnnnnnnnnnnnnnnnnnnnnnnnnnnnnnnnnnnnnnnnnnnnnnnnnnnnnnnnnnnnnnnnnnnnnnnnnnnnnnnnnnnnnnnnnnnnnnnnnnnnnnnnnnnnnnnnnnnnnnnnnnnnnnnnnnnnnnnnnnnnnnnnnnnnnnnnnnnnnnnnnnnnnnnnnnnnnnnnnnnnnnnnnnnnnnnnnnnnnnnnnnnnnnnnnnnnnnnnnnnnnnnnnnnnnnnnnnnnnnnnnnnnnnnnnnnnnnnnnnnnnnnnnnnnnnnnnnnnnnnnnnnnnnnnnnnnnnnnnnnnnnnnnnnnnnnnnnnnnnnnnnnnnnnnnnnnnnnnnnnnnnnnnnnnnnnnnnnnnnnnnnnnnnnnnnnnnnnnnnnnnnnnnnnnnnnnnnnnnnnnnnnnnnnnnnnnnnnnnnnnnnnnnnnnnnnnnnnnnnnnnnnnnnnnnnnnnnnnnnnnnnnnnnnnnnnnnnnnnnnnnnnnnnnnnnnnnnnnnnnnnnnnnnnnnnnnnnnnnnnnnnnnnnnnnnnnnnnnnnnnnnnnnnnnnnnnnnnnnnnnnnnnnnnnnnnnnnnnnnnnnnnnnnnnnnnnnnnnnnnnnnnnnnnnnnnnnnnnnnnnnnnnnnnnnnnnnnnnnnnnnnnnnnnnnnnnnnnnnnnnnnnnnnnnnnnnnnnnnnnnnnnnnnnnnnnnnnnnnnnnnnnnnnnnnnnnnnnnnnnnnnnnnnnnnnnnnnnnnnnnnnnnnnnnnnnnnnnnnnnnnnnnnnnnnnnnnnnnnnnnnnnnnnnnnnnnnnnnnnnnnnnnnnnnnnnnnnnnnnnnnnnnnnnnnnnnnnnnnnnnnnnnnnnnnnnnnnnnnnnnnnnnnnnnnnnnnnnnnnnnnnnnnnnnnnnnnnnnnnnnnnnnnnnnnnnnnnnnnnnnnnnnnnnnnnnnnnnnnnnnnnnnnnnnnnnnnnnnnnnnnnnnnnnnnnnnnnnnnnnnnnnnnnnnnnnnnnnnnnnnnnnnnnnnnnnnnnnnnnnnnnnnnnnnnnnnnnnnnnnnnnnnnnnnnnnnnnnnnnnnnnnnnnnnnnnnnnnnnnnnnnnnnnnnnnnnnnnnnnnnnnnnnnnnnnnnnnnnnnnnnnnnnnnnnnnnnnnnnnnnnnnnnnnnnnnnnnnnnnnnnnnnnnnnnnnnnnnnnnnnnnnnnnnnnnnnnnnnnnnnnnnnnnnnnnnnnnnnnnnnnnnnnnnnnnnnnnnnnnnnnnnnnnnnnnnnnnnnnnnnnnnnnnnnnnnnnnnnnnnnnnnnnnnnnnnnnnnnnnnnnnnnnnnnnnnnnnnnnnnnnnnnnnnnnnnnnnnnnnnnnnnnnnnnnnnnnnnnnnnnnnnnnnnnnnnnnnnnnnnnnnnnnnnnnnnnnnnnnnnnnnnnnnnnnnnnnnnnnnnnnnnnnnnnnnnnnnnnnnnnnnnnnnnnnnnnnnnnnnnnnnnnnnnnnnnnnnnnnnnnnnnnnnnnnnnnnnnnnnnnnnnnnnnnnnnnnnnnnnnnnnnnnnnnnnnnnnnnnnnnnnnnnnnnnnnnnnnnnnnnnnnnnnnnnnnnnnnnnnnnnnnnnnnnnnnnnnnnnnnnnnnnnnnnnnnnnnnnnnnnnnnnnnnnnnnnnnnnnnnnnnnnnnnnnnnnnnnnnnnnnnnnnnnnnnnnnnnnnnnnnnnnnnnnnnnnnnnnnnnnnnnnnnnnnnnnnnnnnnnnnnnnnnnnnnnnnnnnnnnnnnnnnnnnnnnnnnnnnnnnnnnnnnnnnnnnnnnnnnnnnnnnnnnnnnnnnnnnnnnnnnnnnnnnnnnnnnnnnnnnnnnnnnnnnnnnnnnnnnnnnnnnnnnnnnnnnnnnnnnnnnnnnnnnnnnnnnnnnnnnnnnnnnnnnnnnnnnnnnnnnnnnnnnnnnnnnnnnnnnnnnnnnnnnnnnnnnnnnnnnnnnnnnnnnnnnnnnnnnnnnnnnnnnnnnnnnnnnnnnnnnnnnnnnnnnnnnnnnnnnnnnnnnnnnnnnnnnnnnnnnnnnnnnnnnnnnnnnnnnnnnnnnnnnnnnnnnnnnnnnnnnnnnnnnnnnnnnnnnnnnnnnnnnnnnnnnnnnnnnnnnnnnnnnnnnnnnnnnnnnnnnnnnnnnnnnnnnnnnnnnnnnnnnnnnnnnnnnnnnnnnnnnnnnnnnnnnnnnnnnnnnnnnnnnnnnnnnnnnnnnnnnnnnnnnnnnnnnnnnnnnnnnnnnnnnnnnnnnnnnnnnnnnnnnnnnnnnnnnnnnnnnnnnnnnnnnnnnnnnnnnnnnnnnnnnnnnnnnnnnnnnnnnnnnnnnnnnnnnnnnnnnnnnnnnnnnnnnnnnnnnnnnnnnnnnnnnnnnnnnnnnnnnnnnnnnnnnnnnnnnnnnnnnnnnnnnnnnnnnnnnnnnnnnnnnnnnnnnnnnnnnnnnnnnnnnnnnnnnnnnnnnnnnnnnnnnnnnnnnnnnnnnnnnnnnnnnnnnnnnnnnnnnnnnnnnnnnnnnnnnnnnnnnnnnnnnnnnnnnnnnnnnnnnnnnnnnnnnnnnnnnnnnnnnnnnnnnnnnnnnnnnnnnnnnnnnnnnnnnnnnnnnnnnnnnnnnnnnnnnnnnnnnnnnnnnnnnnnnnnnnnnnnnnnnnnnnnnnnnnnnnnnnnnnnnnnnnnnnnnnnnnnnnnnnnnnnnnnnnnnnnnnnnnnnnnnnnnnnnnnnnnnnnnnnnnnnnnnnnnnnnnnnnnnnnnnnnnnnnnnnnnnnnnnnnnnnnnnnnnnnnnnnnnnnnnnnnnnnnnnnnnnnnnnnnnnnnnnnnnnnnnnnnnnnnnnnnnnnnnnnnnnnnnnnnnnnnnnnnnnnnnnnnnnnnnnnnnnnnnnnnnnnnnnnnnnnnnnnnnnnnnnnnnnnnnnnnnnnnnnnnnnnnnnnnnnnnnnnnnnnnnnnnnnnnnnnnnnnnnnnnnnnnnnnnnnnnnnnnnnnnnnnnnnnnnnnnnnnnnnnnnnnnnnnnnnnnnnnnnnnnnnnnnnnnnnnnnnnnnnnnnnnnnnnnnnnnnnnnnnnnnnnnnnnnnnnnnnnnnnnnnnnnnnnnnnnnnnnnnnnnnnnnnnnnnnnnnnnnnnnnnnnnnnnnnnnnnnnnnnnnnnnnnnnnnnnnnnnnnnnnnnnnnnnnnnnnnnnnnnnnnnnnnnnnnnnnnnnnnnnnnnnnnnnnnnnnnnnnnnnnnnnnnnnnnnnnnnnnnnnnnnnnnnnnnnnnnnnnnnnnnnnnnnnnnnnnnnnnnnnnnnnnnnnnnnnnnnnnnnnnnnnnnnnnnnnnnnnnnnnnnnnnnnnnnnnnnnnnnnnnnnnnnnnnnnnnnnnnnnnnnnnnnnnnnnnnnnnnnnnnnnnnnnnnnnnnnnnnnnnnnnnnnnnnnnnnnnnnnnnnnnnnnnnnnnnnnnnnnnnnnnnnnnnnnnnnnnnnnnnnnnnnnnnnnnnnnnnnnnnnnnnnnnnnnnnnnnnnnnnnnnnnnnnnnnnnnnnnnnnnnnnnnnnnnnnnnnnnnnnnnnnnnnnnnnnnnnnnnnnnnnnnnnnnnnnnnnnnnnnnnnnnnnnnnnnnnnnnnnnnnnnnnnnnnnnnnnnnnnnnnnnnnnnnnnnnnnnnnnnnnnnnnnnnnnnnnnnnnnnnnnnnnnnnnnnnnnnnnnnnnnnnnnnnnnnnnnnnnnnnnnnnnnnnnnnnnnnnnnnnnnnnnnnnnnnnnnnnnnnnnnnnnnnnnnnnnnnnnnnnnnnnnnnnnnnnnnnnnnnnnnnnnnnnnnnnnnnnnnnnnnnnnnnnnnnnnnnnnnnnnnnnnnnnnnnnnnnnnnnnnnnnnnnnnnnnnnnnnnnnnnnnnnnnnnnnnnnnnnnnnnnnnnnnnnnnnnnnnnnnnnnnnnnnnnnnnnnnnnnnnnnnnnnnnnnnnnnnnnnnnnnnnnnnnnnnnnnnnnnnnnnnnnnnnnnnnnnnnnnnnnnnnnnnnnnnnnnnnnnnnnnnnnnnnnnnnnnnnnnnnnnnnnnnnnnnnnnnnnnnnnnnnnnnnnnnnnnnnnnnnnnnnnnnnnnnnnnnnnnnnnnnnnnnnnnnnnnnnnnnnnnnnnnnnnnnnnnnnnnnnnnnnnnnnnnnnnnnnnnnnnnnnnnnnnnnnnnnnnnnnnnnnnnnnnnnnnnnnnnnnnnnnnnnnnnnnnnnnnnnnnnnnnnnnnnnnnnnnnnnnnnnnnnnnnnnnnnnnnnnnnnnnnnnnnnnnnnnnnnnnnnnnnnnnnnnnnnnnnnnnnnnnnnnnnnnnnnnnnnnnnnnnnnnnnnnnnnnnnnnnnnnnnnnnnnnnnnnnnnnnnnnnnnnnnnnnnnnnnnnnnnnnnnnnnnnnnnnnnnnnnnnnnnnnnnnnnnnnnnnnnnnnnnnnnnnnnnnnnnnnnnnnnnnnnnnnnnnnnnnnnnnnnnnnnnnnnnnnnnnnnnnnnnnnnnnnnnnnnnnnnnnnnnnnnnnnnnnnnnnnnnnnnnnnnnnnnnnnnnnnnnnnnnnnnnnnnnnnnnnnnnnnnnnnnnnnnnnnnnnnnnnnnnnnnnnnnnnnnnnnnnnnnnnnnnnnnnnnnnnnnnnnnnnnnnnnnnnnnnnnnnnnnnnnnnnnnnnnnnnnnnnnnnnnnnnnnnnnnnnnnnnnnnnnnnnnnnnnnnnnnnnnnnnnnnnnnnnnnnnnnnnnnnnnnnnnnnnnnnnnnnnnnnnnnnnnnnnnnnnnnnnnnnnnnnnnnnnnnnnnnnnnnnnnnnnnnnnnnnnnnnnnnnnnnnnnnnnnnnnnnnnnnnnnnnnnnnnnnnnnnnnnnnnnnnnnnnnnnnnnnnnnnnnnnnnnnnnnnnnnnnnnnnnnnnnnnnnnnnnnnnnnnnnnnnnnnnnnnnnnnnnnnnnnnnnnnnnnnnnnnnnnnnnnnnnnnnnnnnnnnnnnnnnnnnnnnnnnnnnnnnnnnnnnnnnnnnnnnnnnnnnnnnnnnnnnnnnnnnnnnnnnnnnnnnnnnnnnnnnnnnnnnnnnnnnnnnnnnnnnnnnnnnnnnnnnnnnnnnnnnnnnnnnnnnnnnnnnnnnnnnnnnnnnnnnnnnnnnnnnnnnnnnnnnnnnnnnnnnnnnnnnnnnnnnnnnnnnnnnnnnnnnnnnnnnnnnnnnnnnnnnnnnnnnnnnnnnnnnnnnnnnnnnnnnnnnnnnnnnnnnnnnnnnnnnnnnnnnnnnnnnnnnnnnnnnnnnnnnnnnnnnnnnnnnnnnnnnnnnnnnnnnnnnnnnnnnnnnnnnnnnnnnnnnnnnnnnnnnnnnnnnnnnnnnnnnnnnnnnnnnnnnnnnnnnnnnnnnnnnnnnnnnnnnnnnnnnnnnnnnnnnnnnnnnnnnnnnnnnnnnnnnnnnnnnnnnnnnnnnnnnnnnnnnnnnnnnnnnnnnnnnnnnnnnnnnnnnnnnnnnnnnnnnnnnnnnnnnnnnnnnnnnnnnnnnnnnnnnnnnnnnnnnnnnnnnnnnnnnnnnnnnnnnnnnnnnnnnnnnnnnnnnnnnnnnnnnnnnnnnnnnnnnnnnnnnnnnnnnnnnnnnnnnnnnnnnnnnnnnnnnnnnnnnnnnnnnnnnnnnnnnnnnnnnnnnnnnnnnnnnnnnnnnnnnnnnnnnnnnnnnnnnnnnnnnnnnnnnnnnnnnnnnnnnnnnnnnnnnnnnnnnnnnnnnnnnnnnnnnnnnnnnnnnnnnnnnnnnnnnnnnnnnnnnnnnnnnnnnnnnnnnnnnnnnnnnnnnnnnnnnnnnnnnnnnnnnnnnnnnnnnnnnnnnnnnnnnnnnnnnnnnnnnnnnnnnnnnnnnnnnnnnnnnnnnnnnnnnnnnnnnnnnnnnnnnnnnnnnnnnnnnnnnnnnnnnnnnnnnnnnnnnnnnnnnnnnnnnnnnnnnnnnnnnnnnnnnnnnnnnnnnnnnnnnnnnnnnnnnnnnnnnnnnnnnnnnnnnnnnnnnnnnnnnnnnnnnnnnnnnnnnnnnnnnnnnnnnnnnnnnnnnnnnnnnnnnnnnnnnnnnnnnnnnnnnnnnnnnnnnnnnnnnnnnnnnnnnnnnnnnnnnnnnnnnnnnnnnnnnnnnnnnnnnnnnnnnnnnnnnnnnnnnnnnnnnnnnnnnnnnnnnnnnnnnnnnnnnnnnnnnnnnnnnnnnnnnnnnnnnnnnnnnnnnnnnnnnnnnnnnnnnnnnnnnnnnnnnnnnnnnnnnnnnnnnnnnnnnnnnnnnnnnnnnnnnnnnnnnnnnnnnnnnnnnnnnnnnnnnnnnnnnnnnnnnnnnnnnnnnnnnnnnnnnnnnnnnnnnnnnnnnnnnnnnnnnnnnnnnnnnnnnnnnnnnnnnnnnnnnnnnnnnnnnnnnnnnnnnnnnnnnnnnnnnnnnnnnnnnnnnnnnnnnnnnnnnnnnnnnnnnnnnnnnnnnnnnnnnnnnnnnnnnnnnnnnnnnnnnnnnnnnnnnnnnnnnnnnnnnnnnnnnnnnnnnnnnnnnnnnnnnnnnnnnnnnnnnnnnnnnnnnnnnnnnnnnnnnnnnnnnnnnnnnnnnnnnnnnnnnnnnnnnnnnnnnnnnnnnnnnnnnnnnnnnnnnnnnnnnnnnnnnnnnnnnnnnnnnnnnnnnnnnnnnnnnnnnnnnnnnnnnnnnnnnnnnnnnnnnnnnnnnnnnnnnnnnnnnnnnnnnnnnnnnnnnnnnnnnnnnnnnnnnnnnnnnnnnnnnnnnnnnnnnnnnnnnnnnnnnnnnnnnnnnnnnnnnnnnnnnnnnnnnnnnnnnnnnnnnnnnnnnnnnnnnnnnnnnnnnnnnnnnnnnnnnnnnnnnnnnnnnnnnnnnnnnnnnnnnnnnnnnnnnnnnnnnnnnnnnnnnnnnnnnnnnnnnnnnnnnnnnnnnnnnnnnnnnnnnnnnnnnnnnnnnnnnnnnnnnnnnnnnnnnnnnnnnnnnnnnnnnnnnnnnnnnnnnnnnnnnnnnnnnnnnnnnnnnnnnnnnnnnnnnnnnnnnnnnnnnnnnnnnnnnnnnnnnnnnnnnnnnnnnnnnnnnnnnnnnnnnnnnnnnnnnnnnnnnnnnnnnnnnnnnnnnnnnnnnnnnnnnnnnnnnnnnnnnnnnnnnnnnnnnnnnnnnnnnnnnnnnnnnnnnnnnnnnnnnnnnnnnnnnnnnnnnnnnnnnnnnnnnnnnnnnnnnnnnnnnnnnnnnnnnnnnnnnnnnnnnnnnnnnnnnnnnnnnnnnnnnnnnnnnnnnnnnnnnnnnnnnnnnnnnnnnnnnnnnnnnnnnnnnnnnnnnnnnnnnnnnnnnnnnnnnnnnnnnnnnnnnnnnnnnnnnnnnnnnnnnnnnnnnnnnnnnnnnnnnnnnnnnnnnnnnnnnnnnnnnnnnnnnnnnnnnnnnnnnnnnnnnnnnnnnnnnnnnnnnnnnnnnnnnnnnnnnnnnnnnnnnnnnnnnnnnnnnnnnnnnnnnnnnnnnnnnnnnnnnnnnnnnnnnnnnnnnnnnnnnnnnnnnnnnnnnnnnnnnnnnnnnnnnnnnnnnnnnnnnnnnnnnnnnnnnnnnnnnnnnnnnnnnnnnnnnnnnnnnnnnnnnnnnnnnnnnnnnnnnnnnnnnnnnnnnnnnnnnnnnnnnnnnnnnnnnnnnnnnnnnnnnnnnnnnnnnnnnnnnnnnnnnnnnnnnnnnnnnnnnnnnnnnnnnnnnnnnnnnnnnnnnnnnnnnnnnnnnnnnnnnnnnnnnnnnnnnnnnnnnnnnnnnnnnnnnnnnnnnnnnnnnnnnnnnnnnnnnnnnnnnnnnnnnnnnnnnnnnnnnnnnnnnnnnnnnnnnnnnnnnnnnnnnnnnnnnnnnnnnnnnnnnnnnnnnnnnnnnnnnnnnnnnnnnnnnnnnnnnnnnnnnnnnnnnnnnnnnnnnnnnnnnnnnnnnnnnnnnnnnnnnnnnnnnnnnnnnnnnnnnnnnnnnnnnnnnnnnnnnnnnnnnnnnnnnnnnnnnnnnnnnnnnnnnnnnnnnnnnnnnnnnnnnnnnnnnnnnnnnnnnnnnnnnnnnnnnnnnnnnnnnnnnnnnnnnnnnnnnnnnnnnnnnnnnnnnnnnnnnnnnnnnnnnnnnnnnnnnnnnnnnnnnnnnnnnnnnnnnnnnnnnnnnnnnnnnnnnnnnnnnnnnnnnnnnnnnnnnnnnnnnnnnnnnnnnnnnnnnnnnnnnnnnnnnnnnnnnnnnnnnnnnnnnnnnnnnnnnnnnnnnnnnnnnnnnnnnnnnnnnnnnnnnnnnnnnnnnnnnnnnnnnnnnnnnnnnnnnnnnnnnnnnnnnnnnnnnnnnnnnnnnnnnnnnnnnnnnnnnnnnnnnnnnnnnnnnnnnnnnnnnnnnnnnnnnnnnnnnnnnnnnnnnnnnnnnnnnnnnnnnnnnnnnnnnnnnnnnnnnnnnnnnnnnnnnnnnnnnnnnnnnnnnnnnnnnnnnnnnnnnnnnnnnnnnnnnnnnnnnnnnnnnnnnnnnnnnnnnnnnnnnnnnnnnnnnnnnnnnnnnnnnnnnnnnnnnnnnnnnnnnnnnnnnnnnnnnnnnnnnnnnnnnnnnnnnnnnnnnnnnnnnnnnnnnnnnnnnnnnnnnnnnnnnnnnnnnnnnnnnnnnnnnnnnnnnnnnnnnnnnnnnnnnnnnnnnnnnnnnnnnnnnnnnnnnnnnnnnnnnnnnnnnnnnnnnnnnnnnnnnnnnnnnnnnnnnnnnnnnnnnnnnnnnnnnnnnnnnnnnnnnnnnnnnnnnnnnnnnnnnnnnnnnnnnnnnnnnnnnnnnnnnnnnnnnnnnnnnnnnnnnnnnnnnnnnnnnnnnnnnnnnnnnnnnnnnnnnnnnnnnnnnnnnnnnnnnnnnnnnnnnnnnnnnnnnnnnnnnnnnnnnnnnnnnnnnnnnnnnnnnnnnnnnnnnnnnnnnnnnnnnnnnnnnnnnnnnnnnnnnnnnnnnnnnnnnnnnnnnnnnnnnnnnnnnnnnnnnnnnnnnnnnnnnnnnnnnnnnnnnnnnnnnnnnnnnnnnnnnnnnnnnnnnnnnnnnnnnnnnnnnnnnnnnnnnnnnnnnnnnnnnnnnnnnnnnnnnnnnnnnnnnnnnnnnnnnnnnnnnnnnnnnnnnnnnnnnnnnnnnnnnnnnnnnnnnnnnnnnnnnnnnnnnnnnnnnnnnnnnnnnnnnnnnnnnnnnnnnnnnnnnnnnnnnnnnnnnnnnnnnnnnnnnnnnnnnnnnnnnnnnnnnnnnnnnnnnnnnnnnnnnnnnnnnnnnnnnnnnnnnnnnnnnnnnnnnnnnnnnnnnnnnnnnnnnnnnnnnnnnnnnnnnnnnnnnnnnnnnnnnnnnnnnnnnnnnnnnnnnnnnnnnnnnnnnnnnnnnnnnnnnnnnnnnnnnnnnnnnnnnnnnnnnnnnnnnnnnnnnnnnnnnnnnnnnnnnnnnnnnnnnnnnnnnnnnnnnnnnnnnnnnnnnnnnnnnnnnnnnnnnnnnnnnnnnnnnnnnnnnnnnnnnnnnnnnnnnnnnnnnnnnnnnnnnnnnnnnnnnnnnnnnnnnnnnnnnnnnnnnnnnnnnnnnnnnnnnnnnnnnnnnnnnnnnnnnnnnnnnnnnnnnnnnnnnnnnnnnnnnnnnnnnnnnnnnnnnnnnnnnnnnnnnnnnnnnnnnnnnnnnnnnnnnnnnnnnnnnnnnnnnnnnnnnnnnnnnnnnnnnnnnnnnnnnnnnnnnnnnnnnnnnnnnnnnnnnnnnnnnnnnnnnnnnnnnnnnnnnnnnnnnnnnnnnnnnnnnnnnnnnnnnnnnnnnnnnnnnnnnnnnnnnnnnnnnnnnnnnnnnnnnnnnnnnnnnnnnnnnnnnnnnnnnnnnnnnnnnnnnnnnnnnnnnnnnnnnnnnnnnnnnnnnnnnnnnnnnnnnnnnnnnnnnnnnnnnnnnnnnnnnnnnnnnnnnnnnnnnnnnnnnnnnnnnnnnnnnnnnnnnnnnnnnnnnnnnnnnnnnnnnnnnnnnnnnnnnnnnnnnnnnnnnnnnnnnnnnnnnnnnnnnnnnnnnnnnnnnnnnnnnnnnnnnnnnnnnnnnnnnnnnnnnnnnnnnnnnnnnnnnnnnnnnnnnnnnnnnnnnnnnnnnnnnnnnnnnnnnnnnnnnnnnnnnnnnnnnnnnnnnnnnnnnnnnnnnnnnnnnnnnnnnnnnnnnnnnnnnnnnnnnnnnnnnnnnnnnnnnnnnnnnnnnnnnnnnnnnnnnnnnnnnnnnnnnnnnnnnnnnnnnnnnnnnnnnnnnnnnnnnnnnnnnnnnnnnnnnnnnnnnnnnnnnnnnnnnnnnnnnnnnnnnnnnnnnnnnnnnnnnnnnnnnnnnnnnnnnnnnnnnnnnnnnnnnnnnnnnnnnnnnnnnnnnnnnnnnnnnnnnnnnnnnnnnnnnnnnnnnnnnnnnnnnnnnnnnnnnnnnnnnnnnnnnnnnnnnnnnnnnnnnnnnnnnnnnnnnnnnnnnnnnnnnnnnnnnnnnnnnnnnnnnnnnnnnnnnnnnnnnnnnnnnnnnnnnnnnnnnnnnnnnnnnnnnnnnnnnnnnnnnnnnnnnnnnnnnnnnnnnnnnnnnnnnnnnnnnnnnnnnnnnnnnnnnnnnnnnnnnnnnnnnnnnnnnnnnnnnnnnnnnnnnnnnnnnnnnnnnnnnnnnnnnnnnnnnnnnnnnnnnnnnnnnnnnnnnnnnnnnnnnnnnnnnnnnnnnnnnnnnnnnnnnnnnnnnnnnnnnnnnnnnnnnnnnnnnnnnnnnnnnnnnnnnnnnnnnnnnnnnnnnnnnnnnnnnnnnnnnnnnnnnnnnnnnnnnnnnnnnnnnnnnnnnnnnnnnnnnnnnnnnnnnnnnnnnnnnnnnnnnnnnnnnnnnnnnnnnnnnnnnnnnnnnnnnnnnnnnnnnnnnnnnnnnnnnnnnnnnnnnnnnnnnnnnnnnnnnnnnnnnnnnnnnnnnnnnnnnnnnnnnnnnnnnnnnnnnnnnnnnnnnnnnnnnnnnnnnnnnnnnnnnnnnnnnnnnnnnnnnnnnnnnnnnnnnnnnnnnnnnnnnnnnnnnnnnnnnnnnnnnnnnnnnnnnnnnnnnnnnnnnnnnnnnnnnnnnnnnnnnnnnnnnnnnnnnnnnnnnnnnnnnnnnnnnnnnnnnnnnnnnnnnnnnnnnnnnnnnnnnnnnnnnnnnnnnnnnnnnnnnnnnnnnnnnnnnnnnnnnnnnnnnnnnnnnnnnnnnnnnnnnnnnnnnnnnnnnnnnnnnnnnnnnnnnnnnnnnnnnnnnnnnnnnnnnnnnnnnnnnnnnnnnnnnnnnnnnnnnnnnnnnnnnnnnnnnnnnnnnnnnnnnnnnnnnnnnnnnnnnnnnnnnnnnnnnnnnnnnnnnnnnnnnnnnnnnnnnnnnnnnnnnnnnnnnnnnnnnnnnnnnnnnnnnnnnnnnnnnnnnnnnnnnnnnnnnnnnnnnnnnnnnnnnnnnnnnnnnnnnnnnnnnnnnnnnnnnnnnnnnnnnnnnnnnnnnnnnnnnnnnnnnnnnnnnnnnnnnnnnnnnnnnnnnnnnnnnnnnnnnnnnnnnnnnnnnnnnnnnnnnnnnnnnnnnnnnnnnnnnnnnnnnnnnnnnnnnnnnnnnnnnnnnnnnnnnnnnnnnnnnnnnnnnnnnnnnnnnnnnnnnnnnnnnnnnnnnnnnnnnnnnnnnnnnnnnnnnnnnnnnnnnnnnnnnnnnnnnnnnnnnnnnnnnnnnnnnnnnnnnnnnnnnnnnnnnnnnnnnnnnnnnnnnnnnnnnnnnnnnnnnnnnnnnnnnnnnnnnnnnnnnnnnnnnnnnnnnnnnnnnnnnnnnnnnnnnnnnnnnnnnnnnnnnnnnnnnnnnnnnnnnnnnnnnnnnnnnnnnnnnnnnnnnnnnnnnnnnnnnnnnnnnnnnnnnnnnnnnnnnnnnnnnnnnnnnnnnnnnnnnnnnnnnnnnnnnnnnnnnnnnnnnnnnnnnnnnnnnnnnnnnnnnnnnnnnnnnnnnnnnnnnnnnnnnnnnnnnnnnnnnnnnnnnnnnnnnnnnnnnnnnnnnnnnnnnnnnnnnnnnnnnnnnnnnnnnnnnnnnnnnnnnnnnnnnnnnnnnnnnnnnnnnnnnnnnnnnnnnnnnnnnnnnnnnnnnnnnnnnnnnnnnnnnnnnnnnnnnnnnnnnnnnnnnnnnnnnnnnnnnnnnnnnnnnnnnnnnnnnnnnnnnnnnnnnnnnnnnnnnnnnnnnnnnnnnnnnnnnnnnnnnnnnnnnnnnnnnnnnnnnnnnnnnnnnnnnnnnnnnnnnnnnnnnnnnnnnnnnnnnnnnnnnnnnnnnnnnnnnnnnnnnnnnnnnnnnnnnnnnnnnnnnnnnnnnnnnnnnnnnnnnnnnnnnnnnnnnnnnnnnnnnnnnnnnnnnnnnnnnnnnnnnnnnnnnnnnnnnnnnnnnnnnnnnnnnnnnnnnnnnnnnnnnnnnnnnnnnnnnnnnnnnnnnnnnnnnnnnnnnnnnnnnnnnnnnnnnnnnnnnnnnnnnnnnnnnnnnnnnnnnnnnnnnnnnnnnnnnnnnnnnnnnnnnnnnnnnnnnnnnnnnnnnnnnnnnnnnnnnnnnnnnnnnnnnnnnnnnnnnnnnnnnnnnnnnnnnnnnnnnnnnnnnnnnnnnnnnnnnnnnnnnnnnnnnnnnnnnnnnnnnnnnnnnnnnnnnnnnnnnnnnnnnnnnnnnnnnnnnnnnnnnnnnnnnnnnnnnnnnnnnnnnnnnnnnnnnnnnnnnnnnnnnnnnnnnnnnnnnnnnnnnnnnnnnnnnnnnnnnnnnnnnnnnnnnnnnnnnnnnnnnnnnnnnnnnnnnnnnnnnnnnnnnnnnnnnnnnnnnnnnnnnnnnnnnnnnnnnnnnnnnnnnnnnnnnnnnnnnnnnnnnnnnnnnnnnnnnnnnnnnnnnnnnnnnnnnnnnnnnnnnnnnnnnnnnnnnnnnnnnnnnnnnnnnnnnnnnnnnnnnnnnnnnnnnnnnnnnnnnnnnnnnnnnnnnnnnnnnnnnnnnnnnnnnnnnnnnnnnnnnnnnnnnnnnnnnnnnnnnnnnnnnnnnnnnnnnnnnnnnnnnnnnnnnnnnnnnnnnnnnnnnnnnnnnnnnnnnnnnnnnnnnnnnnnnnnnnnnnnnnnnnnnnnnnnnnnnnnnnnnnnnnnnnnnnnnnnnnnnnnnnnnnnnnnnnnnnnnnnnnnnnnnnnnnnnnnnnnnnnnnnnnnnnnnnnnnnnnnnnnnnnnnnnnnnnnnnnnnnnnnnnnnnnnnnnnnnnnnnnnnnnnnnnnnnnnnnnnnnnnnnnnnnnnnnnnnnnnnnnnnnnnnnnnnnnnnnnnnnnnnnnnnnnnnnnnnnnnnnnnnnnnnnnnnnnnnnnnnnnnnnnnnnnnnnnnnnnnnnnnnnnnnnnnnnnnnnnnnnnnnnnnnnnnnnnnnnnnnnnnnnnnnnnnnnnnnnnnnnnnnnnnnnnnnnnnnnnnnnnnnnnnnnnnnnnnnnnnnnnnnnnnnnnnnnnnnnnnnnnnnnnnnnnnnnnnnnnnnnnnnnnnnnnnnnnnnnnnnnnnnnnnnnnnnnnnnnnnnnnnnnnnnnnnnnnnnnnnnnnnnnnnnnnnnnnnnnnnnnnnnnnnnnnnnnnnnnnnnnnnnnnnnnnnnnnnnnnnnnnnnnnnnnnnnnnnnnnnnnnnnnnnnnnnnnnnnnnnnnnnnnnnnnnnnnnnnnnnnnnnnnnnnnnnnnnnnnnnnnnnnnnnnnnnnnnnnnnnnnnnnnnnnnnnnnnnnnnnnnnnnnnnnnnnnnnnnnnnnnnnnnnnnnnnnnnnnnnnnnnnnnnnnnnnnnnnnnnnnnnnnnnnnnnnnnnnnnnnnnnnnnnnnnnnnnnnnnnnnnnnnnnnnnnnnnnnnnnnnnnnnnnnnnnnnnnnnnnnnnnnnnnnnnnnnnnnnnnnnnnnnnnnnnnnnnnnnnnnnnnnnnnnnnnnnnnnnnnnnnnnnnnnnnnnnnnnnnnnnnnnnnnnnnnnnnnnnnnnnnnnnnnnnnnnnnnnnnnnnnnnnnnnnnnnnnnnnnnnnnnnnnnnnnnnnnnnnnnnnnnnnnnnnnnnnnnnnnnnnnnnnnnnnnnnnnnnnnnnnnnnnnnnnnnnnnnnnnnnnnnnnnnnnnnnnnnnnnnnnnnnnnnnnnnnnnnnnnnnnnnnnnnnnnnnnnnnnnnnnnnnnnnnnnnnnnnnnnnnnnnnnnnnnnnnnnnnnnnnnnnnnnnnnnnnnnnnnnnnnnnnnnnnnnnnnnnnnnnnnnnnnnnnnnnnnnnnnnnnnnnnnnnnnnnnnnnnnnnnnnnnnnnnnnnnnnnnnnnnnnnnnnnnnnnnnnnnnnnnnnnnnnnnnnnnnnnnnnnnnnnnnnnnnnnnnnnnnnnnnnnnnnnnnnnnnnnnnnnnnnnnnnnnnnnnnnnnnnnnnnnnnnnnnnnnnnnnnnnnnnnnnnnnnnnnnnnnnnnnnnnnnnnnnnnnnnnnnnnnnnnnnnnnnnnnnnnnnnnnnnnnnnnnnnnnnnnnnnnnnnnnnnnnnnnnnnnnnnnnnnnnnnnnnnnnnnnnnnnnnnnnnnnnnnnnnnnnnnnnnnnnnnnnnnnnnnnnnnnnnnnnnnnnnnnnnnnnnnnnnnnnnnnnnnnnnnnnnnnnnnnnnnnnnnnnnnnnnnnnnnnnnnnnnnnnnnnnnnnnnnnnnnnnnnnnnnnnnnnnnnnnnnnnnnnnnnnnnnnnnnnnnnnnnnnnnnnnnnnnnnnnnnnnnnnnnnnnnnnnnnnnnnnnnnnnnnnnnnnnnnnnnnnnnnnnnnnnnnnnnnnnnnnnnnnnnnnnnnnnnnnnnnnnnnnnnnnnnnnnnnnnnnnnnnnnnnnnnnnnnnnnnnnnnnnnnnnnnnnnnnnnnnnnnnnnnnnnnnnnnnnnnnnnnnnnnnnnnnnnnnnnnnnnnnnnnnnnnnnnnnnnnnnnnnnnnnnnnnnnnnnnnnnnnnnnnnnnnnnnnnnnnnnnnnnnnnnnnnnnnnnnnnnnnnnnnnnnnnnnnnnnnnnnnnnnnnnnnnnnnnnnnnnnnnnnnnnnnnnnnnnnnnnnnnnnnnnnnnnnnnnnnnnnnnnnnnnnnnnnnnnnnnnnnnnnnnnnnnnnnnnnnnnnnnnnnnnnnnnnnnnnnnnnnnnnnnnnnnnnnnnnnnnnnnnnnnnnnnnnnnnnnnnnnnnnnnnnnnnnnnnnnnnnnnnnnnnnnnnnnnnnnnnnnnnnnnnnnnnnnnnnnnnnnnnnnnnnnnnnnnnnnnnnnnnnnnnnnnnnnnnnnnnnnnnnnnnnnnnnnnnnnnnnnnnnnnnnnnnnnnnnnnnnnnnnnnnnnnnnnnnnnnnnnnnnnnnnnnnnnnnnnnnnnnnnnnnnnnnnnnnnnnnnnnnnnnnnnnnnnnnnnnnnnnnnnnnnnnnnnnnnnnnnnnnnnnnnnnnnnnnnnnnnnnnnnnnnnnnnnnnnnnnnnnnnnnnnnnnnnnnnnnnnnnnnnnnnnnnnnnnnnnnnnnnnnnnnnnnnnnnnnnnnnnnnnnnnnnnnnnnnnnnnnnnnnnnnnnnnnnnnnnnnnnnnnnnnnnnnnnnnnnnnnnnnnnnnnnnnnnnnnnnnnnnnnnnnnnnnnnnnnnnnnnnnnnnnnnnnnnnnnnnnnnnnnnnnnnnnnnnnnnnnnnnnnnnnnnnnnnnnnnnnnnnnnnnnnnnnnnnnnnnnnnnnnnnnnnnnnnnnnnnnnnnnnnnnnnnnnnnnnnnnnnnnnnnnnnnnnnnnnnnnnnnnnnnnnnnnnnnnnnnnnnnnnnnnnnnnnnnnnnnnnnnnnnnnnnnnnnnnnnnnnnnnnnnnnnnnnnnnnnnnnnnnnnnnnnnnnnnnnnnnnnnnnnnnnnnnnnnnnnnnnnnnnnnnnnnnnnnnnnnnnnnnnnnnnnnnnnnnnnnnnnnnnnnnnnnnnnnnnnnnnnnnnnnnnnnnnnnnnnnnnnnnnnnnnnnnnnnnnnnnnnnnnnnnnnnnnnnnnnnnnnnnnnnnnnnnnnnnnnnnnnnnnnnnnnnnnnnnnnnnnnnnnnnnnnnnnnnnnnnnnnnnnnnnnnnnnnnnnnnnnnnnnnnnnnnnnnnnnnnnnnnnnnnnnnnnnnnnnnnnnnnnnnnnnnnnnnnnnnnnnnnnnnnnnnnnnnnnnnnnnnnnnnnnnnnnnnnnnnnnnnnnnnnnnnnnnnnnnnnnnnnnnnnnnnnnnnnnnnnnnnnnnnnnnnnnnnnnnnnnnnnnnnnnnnnnnnnnnnnnnnnnnnnnnnnnnnnnnnnnnnnnnnnnnnnnnnnnnnnnnnnnnnnnnnnnnnnnnnnnnnnnnnnnnnnnnnnnnnnnnnnnnnnnnnnnnnnnnnnnnnnnnnnnnnnnnnnnnnnnnnnnnnnnnnnnnnnnnnnnnnnnnnnnnnnnnnnnnnnnnnnnnnnnnnnnnnnnnnnnnnnnnnnnnnnnnnnnnnnnnnnnnnnnnnnnnnnnnnnnnnnnnnnnnnnnnnnnnnnnnnnnnnnnnnnnnnnnnnnnnnnnnnnnnnnnnnnnnnnnnnnnnnnnnnnnnnnnnnnnnnnnnnnnnnnnnnnnnnnnnnnnnnnnnnnnnnnnnnnnnnnnnnnnnnnnnnnnnnnnnnnnnnnnnnnnnnnnnnnnnnnnnnnnnnnnnnnnnnnnnnnnnnnnnnnnnnnnnnnnnnnnnnnnnnnnnnnnnnnnnnnnnnnnnnnnnnnnnnnnnnnnnnnnnnnnnnnnnnnnnnnnnnnnnnnnnnnnnnnnnnnnnnnnnnnnnnnnnnnnnnnnnnnnnnnnnnnnnnnnnnnnnnnnnnnnnnnnnnnnnnnnnnnnnnnnnnnnnnnnnnnnnnnnnnnnnnnnnnnnnnnnnnnnnnnnnnnnnnnnnnnnnnnnnnnnnnnnnnnnnnnnnnnnnnnnnnnnnnnnnnnnnnnnnnnnnnnnnnnnnnnnnnnnnnnnnnnnnnnnnnnnnnnnnnnnnnnnnnnnnnnnnnnnnnnnnnnnnnnnnnnnnnnnnnnnnnnnnnnnnnnnnnnnnnnnnnnnnnnnnnnnnnnnnnnnnnnnnnnnnnnnnnnnnnnnnnnnnnnnnnnnnnnnnnnnnnnnnnnnnnnnnnnnnnnnnnnnnnnnnnnnnnnnnnnnnnnnnnnnnnnnnnnnnnnnnnnnnnnnnnnnnnnnnnnnnnnnnnnnnnnnnnnnnnnnnnnnnnnnnnnnnnnnnnnnnnnnnnnnnnnnnnnnnnnnnnnnnnnnnnnnnnnnnnnnnnnnnnnnnnnnnnnnnnnnnnnnnnnnnnnnnnnnnnnnnnnnnnnnnnnnnnnnnnnnnnnnnnnnnnnnnnnnnnnnnnnnnnnnnnnnnnnnnnnnnnnnnnnnnnnnnnnnnnnnnnnnnnnnnnnnnnnnnnnnnnnnnnnnnnnnnnnnnnnnnnnnnnnnnnnnnnnnnnnnnnnnnnnnnnnnnnnnnnnnnnnnnnnnnnnnnnnnnnnnnnnnnnnnnnnnnnnnnnnnnnnnnnnnnnnnnnnnnnnnnnnnnnnnnnnnnnnnnnnnnnnnnnnnnnnnnnnnnnnnnnnnnnnnnnnnnnnnnnnnnnnnnnnnnnnnnnnnnnnnnnnnnnnnnnnnnnnnnnnnnnnnnnnnnnnnnnnnnnnnnnnnnnnnnnnnnnnnnnnnnnnnnnnnnnnnnnnnnnnnnnnnnnnnnnnnnnnnnnnnnnnnnnnnnnnnnnnnnnnnnnnnnnnnnnnnnnnnnnnnnnnnnnnnnnnnnnnnnnnnnnnnnnnnnnnnnnnnnnnnnnnnnnnnnnnnnnnnnnnnnnnnnnnnnnnnnnnnnnnnnnnnnnnnnnnnnnnnnnnnnnnnnnnnnnnnnnnnnnnnnnnnnnnnnnnnnnnnnnnnnnnnnnnnnnnnnnnnnnnnnnnnnnnnnnnnnnnnnnnnnnnnnnnnnnnnnnnnnnnnnnnnnnnnnnnnnnnnnnnnnnnnnnnnnnnnnnnnnnnnnnnnnnnnnnnnnnnnnnnnnnnnnnnnnnnnnnnnnnnnnnnnnnnnnnnnnnnnnnnnnnnnnnnnnnnnnnnnnnnnnnnnnnnnnnnnnnnnnnnnnnnnnnnnnnnnnnnnnnnnnnnnnnnnnnnnnnnnnnnnnnnnnnnnnnnnnnnnnnnnnnnnnnnnnnnnnnnnnnnnnnnnnnnnnnnnnnnnnnnnnnnnnnnnnnnnnnnnnnnnnnnnnnnnnnnnnnnnnnnnnnnnnnnnnnnnnnnnnnnnnnnnnnnnnnnnnnnnnnnnnnnnnnnnnnnnnnnnnnnnnnnnnnnnnnnnnnnnnnnnnnnnnnnnnnnnnnnnnnnnnnnnnnnnnnnnnnnnnnnnnnnnnnnnnnnnnnnnnnnnnnnnnnnnnnnnnnnnnnnnnnnnnnnnnnnnnnnnnnnnnnnnnnnnnnnnnnnnnnnnnnnnnnnnnnnnnnnnnnnnnnnnnnnnnnnnnnnnnnnnnnnnnnnnnnnnnnnnnnnnnnnnnnnnnnnnnnnnnnnnnnnnnnnnnnnnnnnnnnnnnnnnnnnnnnnnnnnnnnnnnnnnnnnnnnnnnnnnnnnnnnnnnnnnnnnnnnnnnnnnnnnnnnnnnnnnnnnnnnnnnnnnnnnnnnnnnnnnnnnnnnnnnnnnnnnnnnnnnnnnnnnnnnnnnnnnnnnnnnnnnnnnnnnnnnnnnnnnnnnnnnnnnnnnnnnnnnnnnnnnnnnnnnnnnnnnnnnnnnnnnnnnnnnnnnnnnnnnnnnnnnnnnnnnnnnnnnnnnnnnnnnnnnnnnnnnnnnnnnnnnnnnnnnnnnnnnnnnnnnnnnnnnnnnnnnnnnnnnnnnnnnnnnnnnnnnnnnnnnnnnnnnnnnnnnnnnnnnnnnnnnnnnnnnnnnnnnnnnnnnnnnnnnnnnnnnnnnnnnnnnnnnnnnnnnnnnnnnnnnnnnnnnnnnnnnnnnnnnnnnnnnnnnnnnnnnnnnnnnnnnnnnnnnnnnnnnnnnnnnnnnnnnnnnnnnnnnnnnnnnnnnnnnnnnnnnnnnnnnnnnnnnnnnnnnnnnnnnnnnnnnnnnnnnnnnnnnnnnnnnnnnnnnnnnnnnnnnnnnnnnnnnnnnnnnnnnnnnnnnnnnnnnnnnnnnnnnnnnnnnnnnnnnnnnnnnnnnnnnnnnnnnnnnnnnnnnnnnnnnnnnnnnnnnnnnnnnnnnnnnnnnnnnnnnnnnnnnnnnnnnnnnnnnnnnnnnnnnnnnnnnnnnnnnnnnnnnnnnnnnnnnnnnnnnnnnnnnnnnnnnnnnnnnnnnnnnnnnnnnnnnnnnnnnnnnnnnnnnnnnnnnnnnnnnnnnnnnnnnnnnnnnnnnnnnnnnnnnnnnnnnnnnnnnnnnnnnnnnnnnnnnnnnnnnnnnnnnnnnnnnnnnnnnnnnnnnnnnnnnnnnnnnnnnnnnnnnnnnnnnnnnnnnnnnnnnnnnnnnnnnnnnnnnnnnnnnnnnnnnnnnnnnnnnnnnnnnnnnnnnnnnnnnnnnnnnnnnnnnnnnnnnnnnnnnnnnnnnnnnnnnnnnnnnnnnnnnnnnnnnnnnnnnnnnnnnnnnnnnnnnnnnnnnnnnnnnnnnnnnnnnnnnnnnnnnnnnnnnnnnnnnnnnnnnnnnnnnnnnnnnnnnnnnnnnnnnnnnnnnnnnnnnnnnnnnnnnnnnnnnnnnnnnnnnnnnnnnnnnnnnnnnnnnnnnnnnnnnnnnnnnnnnnnnnnnnnnnnnnnnnnnnnnnnnnnnnnnnnnnnnnnnnnnnnnnnnnnnnnnnnnnnnnnnnnnnnnnnnnnnnnnnnnnnnnnnnnnnnnnnnnnnnnnnnnnnnnnnnnnnnnnnnnnnnnnnnnnnnnnnnnnnnnnnnnnnnnnnnnnnnnnnnnnnnnnnnnnnnnnnnnnnnnnnnnnnnnnnnnnnnnnnnnnnnnnnnnnnnnnnnnnnnnnnnnnnnnnnnnnnnnnnnnnnnnnnnnnnnnnnnnnnnnnnnnnnnnnnnnnnnnnnnnnnnnnnnnnnnnnnnnnnnnnnnnnnnnnnnnnnnnnnnnnnnnnnnnnnnnnnnnnnnnnnnnnnnnnnnnnnnnnnnnnnnnnnnnnnnnnnnnnnnnnnnnnnnnnnnnnnnnnnnnnnnnnnnnnnnnnnnnnnnnnnnnnnnnnnnnnnnnnnnnnnnnnnnnnnnnnnnnnnnnnnnnnnnnnnnnnnnnnnnnnnnnnnnnnnnnnnnnnnnnnnnnnnnnnnnnnnnnnnnnnnnnnnnnnnnnnnnnnnnnnnnnnnnnnnnnnnnnnnnnnnnnnnnnnnnnnnnnnnnnnnnnnnnnnnnnnnnnnnnnnnnnnnnnnnnnnnnnnnnnnnnnnnnnnnnnnnnnnnnnnnnnnnnnnnnnnnnnnnnnnnnnnnnnnnnnnnnnnnnnnnnnnnnnnnnnnnnnnnnnnnnnnnnnnnnnnnnnnnnnnnnnnnnnnnnnnnnnnnnnnnnnnnnnnnnnnnnnnnnnnnnnnnnnnnnnnnnnnnnnnnnnnnnnnnnnnnnnnnnnnnnnnnnnnnnnnnnnnnnnnnnnnnnnnnnnnnnnnnnnnnnnnnnnnnnnnnnnnnnnnnnnnnnnnnnnnnnnnnnnnnnnnnnnnnnnnnnnnnnnnnnnnnnnnnnnnnnnnnnnnnnnnnnnnnnnnnnnnnnnnnnnnnnnnnnnnnnnnnnnnnnnnnnnnnnnnnnnnnnnnnnnnnnnnnnnnnnnnnnnnnnnnnnnnnnnnnnnnnnnnnnnnnnnnnnnnnnnnnnnnnnnnnnnnnnnnnnnnnnnnnnnnnnnnnnnnnnnnnnnnnnnnnnnnnnnnnnnnnnnnnnnnnnnnnnnnnnnnnnnnnnnnnnnnnnnnnnnnnnnnnnnnnnnnnnnnnnnnnnnnnnnnnnnnnnnnnnnnnnnnnnnnnnnnnnnnnnnnnnnnnnnnnnnnnnnnnnnnnnnnnnnnnnnnnnnnnnnnnnnnnnnnnnnnnnnnnnnnnnnnnnnnnnnnnnnnnnnnnnnnnnnnnnnnnnnnnnnnnnnnnnnnnnnnnnnnnnnnnnnnnnnnnnnnnnnnnnnnnnnnnnnnnnnnnnnnnnnnnnnnnnnnnnnnnnnnnnnnnnnnnnnnnnnnnnnnnnnnnnnnnnnnnnnnnnnnnnnnnnnnnnnnnnnnnnnnnnnnnnnnnnnnnnnnnnnnnnnnnnnnnnnnnnnnnnnnnnnnnnnnnnnnnnnnnnnnnnnnnnnnnnnnnnnnnnnnnnnnnnnnnnnnnnnnnnnnnnnnnnnnnnnnnnnnnnnnnnnnnnnnnnnnnnnnnnnnnnnnnnnnnnnnnnnnnnnnnnnnnnnnnnnnnnnnnnnnnnnnnnnnnnnnnnnnnnnnnnnnnnnnnnnnnnnnnnnnnnnnnnnnnnnnnnnnnnnnnnnnnnnnnnnnnnnnnnnnnnnnnnnnnnnnnnnnnnnnnnnnnnnnnnnnnnnnnnnnnnnnnnnnnnnnnnnnnnnnnnnnnnnnnnnnnnnnnnnnnnnnnnnnnnnnnnnnnnnnnnnnnnnnnnnnnnnnnnnnnnnnnnnnnnnnnnnnnnnnnnnnnnnnnnnnnnnnnnnnnnnnnnnnnnnnnnnnnnnnnnnnnnnnnnnnnnnnnnnnnnnnnnnnnnnnnnnnnnnnnnnnnnnnnnnnnnnnnnnnnnnnnnnnnnnnnnnnnnnnnnnnnnnnnnnnnnnnnnnnnnnnnnnnnnnnnnnnnnnnnnnnnnnnnnnnnnnnnnnnnnnnnnnnnnnnnnnnnnnnnnnnnnnnnnnnnnnnnnnnnnnnnnnnnnnnnnnnnnnnnnnnnnnnnnnnnnnnnnnnnnnnnnnnnnnnnnnnnnnnnnnnnnnnnnnnnnnnnnnnnnnnnnnnnnnnnnnnnnnnnnnnnnnnnnnnnnnnnnnnnnnnnnnnnnnnnnnnnnnnnnnnnnnnnnnnnnnnnnnnnnnnnnnnnnnnnnnnnnnnnnnnnnnnnnnnnnnnnnnnnnnnnnnnnnnnnnnnnnnnnnnnnnnnnnnnnnnnnnnnnnnnnnnnnnnnnnnnnnnnnnnnnnnnnnnnnnnnnnnnnnnnnnnnnnnnnnnnnnnnnnnnnnnnnnnnnnnnnnnnnnnnnnnnnnnnnnnnnnnnnnnnnnnnnnnnnnnnnnnnnnnnnnnnnnnnnnnnnnnnnnnnnnnnnnnnnnnnnnnnnnnnnnnnnnnnnnnnnnnnnnnnnnnnnnnnnnnnnnnnnnnnnnnnnnnnnnnnnnnnnnnnnnnnnnnnnnnnnnnnnnnnnnnnnnnnnnnnnnnnnnnnnnnnnnnnnnnnnnnnnnnnnnnnnnnnnnnnnnnnnnnnnnnnnnnnnnnnnnnnnnnnnnnnnnnnnnnnnnnnnnnnnnnnnnnnnnnnnnnnnnnnnnnnnnnnnnnnnnnnnnnnnnnnnnnnnnnnnnnnnnnnnnnnnnnnnnnnnnnnnnnnnnnnnnnnnnnnnnnnnnnnnnnnnnnnnnnnnnnnnnnnnnnnnnnnnnnnnnnnnnnnnnnnnnnnnnnnnnnnnnnnnnnnnnnnnnnnnnnnnnnnnnnnnnnnnnnnnnnnnnnnnnnnnnnnnnnnnnnnnnnnnnnnnnnnnnnnnnnnnnnnnnnnnnnnnnnnnnnnnnnnnnnnnnnnnnnnnnnnnnnnnnnnnnnnnnnnnnnnnnnnnnnnnnnnnnnnnnnnnnnnnnnnnnnnnnnnnnnnnnnnnnnnnnnnnnnnnnnnnnnnnnnnnnnnnnnnnnnnnnnnnnnnnnnnnnnnnnnnnnnnnnnnnnnnnnnnnnnnnnnnnnnnnnnnnnnnnnnnnnnnnnnnnnnnnnnnnnnnnnnnnnnnnnnnnnnnnnnnnnnnnnnnnnnnnnnnnnnnnnnnnnnnnnnnnnnnnnnnnnnnnnnnnnnnnnnnnnnnnnnnnnnnnnnnnnnnnnnnnnnnnnnnnnnnnnnnnnnnnnnnnnnnnnnnnnnnnnnnnnnnnnnnnnnnnnnnnnnnnnnnnnnnnnnnnnnnnnnnnnnnnnnnnnnnnnnnnnnnnnnnnnnnnnnnnnnnnnnnnnnnnnnnnnnnnnnnnnnnnnnnnnnnnnnnnnnnnnnnnnnnnnnnnnnnnnnnnnnnnnnnnnnnnnnnnnnnnnnnnnnnnnnnnnnnnnnnnnnnnnnnnnnnnnnnnnnnnnnnnnnnnnnnnnnnnnnnnnnnnnnnnnnnnnnnnnnnnnnnnnnnnnnnnnnnnnnnnnnnnnnnnnnnnnnnnnnnnnnnnnnnnnnnnnnnnnnnnnnnnnnnnnnnnnnnnnnnnnnnnnnnnnnnnnnnnnnnnnnnnnnnnnnnnnnnnnnnnnnnnnnnnnnnnnnnnnnnnnnnnnnnnnnnnnnnnnnnnnnnnnnnnnnnnnnnnnnnnnnnnnnnnnnnnnnnnnnnnnnnnnnnnnnnnnnnnnnnnnnnnnnnnnnnnnnnnnnnnnnnnnnnnnnnnnnnnnnnnnnnnnnnnnnnnnnnnnnnnnnnnnnnnnnnnnnnnnnnnnnnnnnnnnnnnnnnnnnnnnnnnnnnnnnnnnnnnnnnnnnnnnnnnnnnnnnnnnnnnnnnnnnnnnnnnnnnnnnnnnnnnnnnnnnnnnnnnnnnnnnnnnnnnnnnnnnnnnnnnnnnnnnnnnnnnnnnnnnnnnnnnnnnnnnnnnnnnnnnnnnnnnnnnnnnnnnnnnnnnnnnnnnnnnnnnnnnnnnnnnnnnnnnnnnnnnnnnnnnnnnnnnnnnnnnnnnnnnnnnnnnnnnnnnnnnnnnnnnnnnnnnnnnnnnnnnnnnnnnnnnnnnnnnnnnnnnnnnnnnnnnnnnnnnnnnnnnnnnnnnnnnnnnnnnnnnnnnnnnnnnnnnnnnnnnnnnnnnnnnnnnnnnnnnnnnnnnnnnnnnnnnnnnnnnnnnnnnnnnnnnnnnnnnnnnnnnnnnnnnnnnnnnnnnnnnnnnnnnnnnnnnnnnnnnnnnnnnnnnnnnnnnnnnnnnnnnnnnnnnnnnnnnnnnnnnnnnnnnnnnnnnnnnnnnnnnnnnnnnnnnnnnnnnnnnnnnnnnnnnnnnnnnnnnnnnnnnnnnnnnnnnnnnnnnnnnnnnnnnnnnnnnnnnnnnnnnnnnnnnnnnnnnnnnnnnnnnnnnnnnnnnnnnnnnnnnnnnnnnnnnnnnnnnnnnnnnnnnnnnnnnnnnnnnnnnnnnnnnnnnnnnnnnnnnnnnnnnnnnnnnnnnnnnnnnnnnnnnnnnnnnnnnnnnnnnnnnnnnnnnnnnnnnnnnnnnnnnnnnnnnnnnnnnnnnnnnnnnnnnnnnnnnnnnnnnnnnnnnnnnnnnnnnnnnnnnnnnnnnnnnnnnnnnnnnnnnnnnnnnnnnnnnnnnnnnnnnnnnnnnnnnnnnnnnnnnnnnnnnnnnnnnnnnnnnnnnnnnnnnnnnnnnnnnnnnnnnnnnnnnnnnnnnnnnnnnnnnnnnnnnnnnnnnnnnnnnnnnnnnnnnnnnnnnnnnnnnnnnnnnnnnnnnnnnnnnnnnnnnnnnnnnnnnnnnnnnnnnnnnnnnnnnnnnnnnnnnnnnnnnnnnnnnnnnnnnnnnnnnnnnnnnnnnnnnnnnnnnnnnnnnnnnnnnnnnnnnnnnnnnnnnnnnnnnnnnnnnnnnnnnnnnnnnnnnnnnnnnnnnnnnnnnnnnnnnnnnnnnnnnnnnnnnnnnnnnnnnnnnnnnnnnnnnnnnnnnnnnnnnnnnnnnnnnnnnnnnnnnnnnnnnnnnnnnnnnnnnnnnnnnnnnnnnnnnnnnnnnnnnnnnnnnnnnnnnnnnnnnnnnnnnnnnnnnnnnnnnnnnnnnnnnnnnnnnnnnnnnnnnnnnnnnnnnnnnnnnnnnnnnnnnnnnnnnnnnnnnnnnnnnnnnnnnnnnnnnnnnnnnnnnnnnnnnnnnnnnnnnnnnnnnnnnnnnnnnnnnnnnnnnnnnnnnnnnnnnnnnnnnnnnnnnnnnnnnnnnnnnnnnnnnnnnnnnnnnnnnnnnnnnnnnnnnnnnnnnnnnnnnnnnnnnnnnnnnnnnnnnnnnnnnnnnnnnnnnnnnnnnnnnnnnnnnnnnnnnnnnnnnnnnnnnnnnnnnnnnnnnnnnnnnnnnnnnnnnnnnnnnnnnnnnnnnnnnnnnnnnnnnnnnnnnnnnnnnnnnnnnnnnnnnnnnnnnnnnnnnnnnnnnnnnnnnnnnnnnnnnnnnnnnnnnnnnnnnnnnnnnnnnnnnnnnnnnnnnnnnnnnnnnnnnnnnnnnnnnnnnnnnnnnnnnnnnnnnnnnnnnnnnnnnnnnnnnnnnnnnnnnnnnnnnnnnnnnnnnnnnnnnnnnnnnnnnnnnnnnnnnnnnnnnnnnnnnnnnnnnnnnnnnnnnnnnnnnnnnnnnnnnnnnnnnnnnnnnnnnnnnnnnnnnnnnnnnnnnnnnnnnnnnnnnnnnnnnnnnnnnnnnnnnnnnnnnnnnnnnnnnnnnnnnnnnnnnnnnnnnnnnnnnnnnnnnnnnnnnnnnnnnnnnnnnnnnnnnnnnnnnnnnnnnnnnnnnnnnnnnnnnnnnnnnnnnnnnnnnnnnnnnnnnnnnnnnnnnnnnnnnnnnnnnnnnnnnnnnnnnnnnnnnnnnnnnnnnnnnnnnnnnnnnnnnnnnnnnnnnnnnnnnnnnnnnnnnnnnnnnnnnnnnnnnnnnnnnnnnnnnnnnnnnnnnnnnnnnnnnnnnnnnnnnnnnnnnnnnnnnnnnnnnnnnnnnnnnnnnnnnnnnnnnnnnnnnnnnnnnnnnnnnnnnnnnnnnnnnnnnnnnnnnnnnnnnnnnnnnnnnnnnnnnnnnnnnnnnnnnnnnnnnnnnnnnnnnnnnnnnnnnnnnnnnnnnnnnnnnnnnnnnnnnnnnnnnnnnnnnnnnnnnnnnnnnnnnnnnnnnnnnnnnnnnnnnnnnnnnnnnnnnnnnnnnnnnnnnnnnnnnnnnnnnnnnnnnnnnnnnnnnnnnnnnnnnnnnnnnnnnnnnnnnnnnnnnnnnnnnnnnnnnnnnnnnnnnnnnnnnnnnnnnnnnnnnnnnnnnnnnnnnnnnnnnnnnnnnnnnnnnnnnnnnnnnnnnnnnnnnnnnnnnnnnnnnnnnnnnnnnnnnnnnnnnnnnnnnnnnnnnnnnnnnnnnnnnnnnnnnnnnnnnnnnnnnnnnnnnnnnnnnnnnnnnnnnnnnnnnnnnnnnnnnnnnnnnnnnnnnnnnnnnnnnnnnnnnnnnnnnnnnnnnnnnnnnnnnnnnnnnnnnnnnnnnnnnnnnnnnnnnnnnnnnnnnnnnnnnnnnnnnnnnnnnnnnnnnnnnnnnnnnnnnnnnnnnnnnnnnnnnnnnnnnnnnnnnnnnnnnnnnnnnnnnnnnnnnnnnnnnnnnnnnnnnnnnnnnnnnnnnnnnnnnnnnnnnnnnnnnnnnnnnnnnnnnnnnnnnnnnnnnnnnnnnnnnnnnnnnnnnnnnnnnnnnnnnnnnnnnnnnnnnnnnnnnnnnnnnnnnnnnnnnnnnnnnnnnnnnnnnnnnnnnnnnnnnnnnnnnnnnnnnnnnnnnnnnnnnnnnnnnnnnnnnnnnnnnnnnnnnnnnnnnnnnnnnnnnnnnnnnnnnnnnnnnnnnnnnnnnnnnnnnnnnnnnnnnnnnnnnnnnnnnnnnnnnnnnnnnnnnnnnnnnnnnnnnnnnnnnnnnnnnnnnnnnnnnnnnnnnnnnnnnnnnnnnnnnnnnnnnnnnnnnnnnnnnnnnnnnnnnnnnnnnnnnnnnnnnnnnnnnnnnnnnnnnnnnnnnnnnnnnnnnnnnnnnnnnnnnnnnnnnnnnnnnnnnnnnnnnnnnnnnnnnnnnnnnnnnnnnnnnnnnnnnnnnnnnnnnnnnnnnnnnnnnnnnnnnnnnnnnnnnnnnnnnnnnnnnnnnnnnnnnnnnnnnnnnnnnnnnnnnnnnnnnnnnnnnnnnnnnnnnnnnnnnnnnnnnnnnnnnnnnnnnnnnnnnnnnnnnnnnnnnnnnnnnnnnnnnnnnnnnnnnnnnnnnnnnnnnnnnnnnnnnnnnnnnnnnnnnnnnnnnnnnnnnnnnnnnnnnnnnnnnnnnnnnnnnnnnnnnnnnnnnnnnnnnnnnnnnnnnnnnnnnnnnnnnnnnnnnnnnnnnnnnnnnnnnnnnnnnnnnnnnnnnnnnnnnnnnnnnnnnnnnnnnnnnnnnnnnnnnnnnnnnnnnnnnnnnnnnnnnnnnnnnnnnnnnnnnnnnnnnnnnnnnnnnnnnnnnnnnnnnnnnnnnnnnnnnnnnnnnnnnnnnnnnnnnnnnnnnnnnnnnnnnnnnnnnnnnnnnnnnnnnnnnnnnnnnnnnnnnnnnnnnnnnnnnnnnnnnnnnnnnnnnnnnnnnnnnnnnnnnnnnnnnnnnnnnnnnnnnnnnnnnnnnnnnnnnnnnnnnnnnnnnnnnnnnnnnnnnnnnnnnnnnnnnnnnnnnnnnnnnnnnnnnnnnnnnnnnnnnnnnnnnnnnnnnnnnnnnnnnnnnnnnnnnnnnnnnnnnnnnnnnnnnnnnnnnnnnnnnnnnnnnnnnnnnnnnnnnnnnnnnnnnnnnnnnnnnnnnnnnnnnnnnnnnnnnnnnnnnnnnnnnnnnnnnnnnnnnnnnnnnnnnnnnnnnnnnnnnnnnnnnnnnnnnnnnnnnnnnnnnnnnnnnnnnnnnnnnnnnnnnnnnnnnnnnnnnnnnnnnnnnnnnnnnnnnnnnnnnnnnnnnnnnnnnnnnnnnnnnnnnnnnnnnnnnnnnnnnnnnnnnnnnnnnnnnnnnnnnnnnnnnnnnnnnnnnnnnnnnnnnnnnnnnnnnnnnnnnnnnnnnnnnnnnnnnnnnnnnnnnnnnnnnnnnnnnnnnnnnnnnnnnnnnnnnnnnnnnnnnnnnnnnnnnnnnnnnnnnnnnnnnnnnnnnnnnnnnnnnnnnnnnnnnnnnnnnnnnnnnnnnnnnnnnnnnnnnnnnnnnnnnnnnnnnnnnnnnnnnnnnnnnnnnnnnnnnnnnnnnnnnnnnnnnnnnnnnnnnnnnnnnnnnnnnnnnnnnnnnnnnnnnnnnnnnnnnnnnnnnnnnnnnnnnnnnnnnnnnnnnnnnnnnnnnnnnnnnnnnnnnnnnnnnnnnnnnnnnnnnnnnnnnnnnnnnnnnnnnnnnnnnnnnnnnnnnnnnnnnnnnnnnnnnnnnnnnnnnnnnnnnnnnnnnnnnnnnnnnnnnnnnnnnnnnnnnnnnnnnnnnnnnnnnnnnnnnnnnnnnnnnnnnnnnnnnnnnnnnnnnnnnnnnnnnnnnnnnnnnnnnnnnnnnnnnnnnnnnnnnnnnnnnnnnnnnnnnnnnnnnnnnnnnnnnnnnnnnnnnnnnnnnnnnnnnnnnnnnnnnnnnnnnnnnnnnnnnnnnnnnnnnnnnnnnnnnnnnnnnnnnnnnnnnnnnnnnnnnnnnnnnnnnnnnnnnnnnnnnnnnnnnnnnnnnnnnnnnnnnnnnnnnnnnnnnnnnnnnnnnnnnnnnnnnnnnnnnnnnnnnnnnnnnnnnnnnnnnnnnnnnnnnnnnnnnnnnnnnnnnnnnnnnnnnnnnnnnnnnnnnnnnnnnnnnnnnnnnnnnnnnnnnnnnnnnnnnnnnnnnnnnnnnnnnnnnnnnnnnnnnnnnnnnnnnnnnnnnnnnnnnnnnnnnnnnnnnnnnnnnnnnnnnnnnnnnnnnnnnnnnnnnnnnnnnnnnnnnnnnnnnnnnnnnnnnnnnnnnnnnnnnnnnnnnnnnnnnnnnnnnnnnnnnnnnnnnnnnnnnnnnnnnnnnnnnnnnnnnnnnnnnnnnnnnnnnnnnnnnnnnnnnnnnnnnnnnnnnnnnnnnnnnnnnnnnnnnnnnnnnnnnnnnnnnnnnnnnnnnnnnnnnnnnnnnnnnnnnnnnnnnnnnnnnnnnnnnnnnnnnnnnnnnnnnnnnnnnnnnnnnnnnnnnnnnnnnnnnnnnnnnnnnnnnnnnnnnnnnnnnnnnnnnnnnnnnnnnnnnnnnnnnnnnnnnnnnnnnnnnnnnnnnnnnnnnnnnnnnnnnnnnnnnnnnnnnnnnnnnnnnnnnnnnnnnnnnnnnnnnnnnnnnnnnnnnnnnnnnnnnnnnnnnnnnnnnnnnnnnnnnnnnnnnnnnnnnnnnnnnnnnnnnnnnnnnnnnnnnnnnnnnnnnnnnnnnnnnnnnnnnnnnnnnnnnnnnnnnnnnnnnnnnnnnnnnnnnnnnnnnnnnnnnnnnnnnnnnnnnnnnnnnnnnnnnnnnnnnnnnnnnnnnnnnnnnnnnnnnnnnnnnnnnnnnnnnnnnnnnnnnnnnnnnnnnnnnnnnnnnnnnnnnnnnnnnnnnnnnnnnnnnnnnnnnnnnnnnnnnnnnnnnnnnnnnnnnnnnnnnnnnnnnnnnnnnnnnnnnnnnnnnnnnnnnnnnnnnnnnnnnnnnnnnnnnnnnnnnnnnnnnnnnnnnnnnnnnnnnnnnnnnnnnnnnnnnnnnnnnnnnnnnnnnnnnnnnnnnnnnnnnnnnnnnnnnnnnnnnnnnnnnnnnnnnnnnnnnnnnnnnnnnnnnnnnnnnnnnnnnnnnnnnnnnnnnnnnnnnnnnnnnnnnnnnnnnnnnnnnnnnnnnnnnnnnnnnnnnnnnnnnnnnnnnnnnnnnnnnnnnnnnnnnnnnnnnnnnnnnnnnnnnnnnnnnnnnnnnnnnnnnnnnnnnnnnnnnnnnnnnnnnnnnnnnnnnnnnnnnnnnnnnnnnnnnnnnnnnnnnnnnnnnnnnnnnnnnnnnnnnnnnnnnnnnnnnnnnnnnnnnnnnnnnnnnnnnnnnnnnnnnnnnnnnnnnnnnnnnnnnnnnnnnnnnnnnnnnnnnnnnnnnnnnnnnnnnnnnnnnnnnnnnnnnnnnnnnnnnnnnnnnnnnnnnnnnnnnnnnnnnnnnnnnnnnnnnnnnnnnnnnnnnnnnnnnnnnnnnnnnnnnnnnnnnnnnnnnnnnnnnnnnnnnnnnnnnnnnnnnnnnnnnnnnnnnnnnnnnnnnnnnnnnnnnnnnnnnnnnnnnnnnnnnnnnnnnnnnnnnnnnnnnnnnnnnnnnnnnnnnnnnnnnnnnnnnnnnnnnnnnnnnnnnnnnnnnnnnnnnnnnnnnnnnnnnnnnnnnnnnnnnnnnnnnnnnnnnnnnnnnnnnnnnnnnnnnnnnnnnnnnnnnnnnnnnnnnnnnnnnnnnnnnnnnnnnnnnnnnnnnnnnnnnnnnnnnnnnnnnnnnnnnnnnnnnnnnnnnnnnnnnnnnnnnnnnnnnnnnnnnnnnnnnnnnnnnnnnnnnnnnnnnnnnnnnnnnnnnnnnnnnnnnnnnnnnnnnnnnnnnnnnnnnnnnnnnnnnnnnnnnnnnnnnnnnnnnnnnnnnnnnnnnnnnnnnnnnnnnnnnnnnnnnnnnnnnnnnnnnnnnnnnnnnnnnnnnnnnnnnnnnnnnnnnnnnnnnnnnnnnnnnnnnnnnnnnnnnnnnnnnnnnnnnnnnnnnnnnnnnnnnnnnnnnnnnnnnnnnnnnnnnnnnnnnnnnnnnnnnnnnnnnnnnnnnnnnnnnnnnnnnnnnnnnnnnnnnnnnnnnnnnnnnnnnnnnnnnnnnnnnnnnnnnnnnnnnnnnnnnnnnnnnnnnnnnnnnnnnnnnnnnnnnnnnnnnnnnnnnnnnnnnnnnnnnnnnnnnnnnnnnnnnnnnnnnnnnnnnnnnnnnnnnnnnnnnnnnnnnnnnnnnnnnnnnnnnnnnnnnnnnnnnnnnnnnnnnnnnnnnnnnnnnnnnnnnnnnnnnnnnnnnnnnnnnnnnnnnnnnnnnnnnnnnnnnnnnnnnnnnnnnnnnnnnnnnnnnnnnnnnnnnnnnnnnnnnnnnnnnnnnnnnnnnnnnnnnnnnnnnnnnnnnnnnnnnnnnnnnnnnnnnnnnnnnnnnnnnnnnnnnnnnnnnnnnnnnnnnnnnnnnnnnnnnnnnnnnnnnnnnnnnnnnnnnnnnnnnnnnnnnnnnnnnnnnnnnnnnnnnnnnnnnnnnnnnnnnnnnnnnnnnnnnnnnnnnnnnnnnnnnnnnnnnnnnnnnnnnnnnnnnnnnnnnnnnnnnnnnnnnnnnnnnnnnnnnnnnnnnnnnnnnnnnnnnnnnnnnnnnnnnnnnnnnnnnnnnnnnnnnnnnnnnnnnnnnnnnnnnnnnnnnnnnnnnnnnnnnnnnnnnnnnnnnnnnnnnnnnnnnnnnnnnnnnnnnnnnnnnnnnnnnnnnnnnnnnnnnnnnnnnnnnnnnnnnnnnnnnnnnnnnnnnnnnnnnnnnnnnnnnnnnnnnnnnnnnnnnnnnnnnnnnnnnnnnnnnnnnnnnnnnnnnnnnnnnnnnnnnnnnnnnnnnnnnnnnnnnnnnnnnnnnnnnnnnnnnnnnnnnnnnnnnnnnnnnnnnnnnnnnnnnnnnnnnnnnnnnnnnnnnnnnnnnnnnnnnnnnnnnnnnnnnnnnnnnnnnnnnnnnnnnnnnnnnnnnnnnnnnnnnnnnnnnnnnnnnnnnnnnnnnnnnnnnnnnnnnnnnnnnnnnnnnnnnnnnnnnnnnnnnnnnnnnnnnnnnnnnnnnnnnnnnnnnnnnnnnnnnnnnnnnnnnnnnnnnnnnnnnnnnnnnnnnnnnnnnnnnnnnnnnnnnnnnnnnnnnnnnnnnnnnnnnnnnnnnnnnnnnnnnnnnnnnnnnnnnnnnnnnnnnnnnnnnnnnnnnnnnnnnnnnnnnnnnnnnnnnnnnnnnnnnnnnnnnnnnnnnnnnnnnnnnnnnnnnnnnnnnnnnnnnnnnnnnnnnnnnnnnnnnnnnnnnnnnnnnnnnnnnnnnnnnnnnnnnnnnnnnnnnnnnnnnnnnnnnnnnnnnnnnnnnnnnnnnnnnnnnnnnnnnnnnnnnnnnnnnnnnnnnnnnnnnnnnnnnnnnnnnnnnnnnnnnnnnnnnnnnnnnnnnnnnnnnnnnnnnnnnnnnnnnnnnnnnnnnnnnnnnnnnnnnnnnnnnnnnnnnnnnnnnnnnnnnnnnnnnnnnnnnnnnnnnnnnnnnnnnnnnnnnnnnnnnnnnnnnnnnnnnnnnnnnnnnnnnnnnnnnnnnnnnnnnnnnnnnnnnnnnnnnnnnnnnnnnnnnnnnnnnnnnnnnnnnnnnnnnnnnnnnnnnnnnnnnnnnnnnnnnnnnnnnnnnnnnnnnnnnnnnnnnnnnnnnnnnnnnnnnnnnnnnnnnnnnnnnnnnnnnnnnnnnnnnnnnnnnnnnnnnnnnnnnnnnnnnnnnnnnnnnnnnnnnnnnnnnnnnnnnnnnnnnnnnnnnnnnnnnnnnnnnnnnnnnnnnnnnnnnnnnnnnnnnnnnnnnnnnnnnnnnnnnnnnnnnnnnnnnnnnnnnnnnnnnnnnnnnnnnnnnnnnnnnnnnnnnnnnnnnnnnnnnnnnnnnnnnnnnnnnnnnnnnnnnnnnnnnnnnnnnnnnnnnnnnnnnnnnnnnnnnnnnnnnnnnnnnnnnnnnnnnnnnnnnnnnnnnnnnnnnnnnnnnnnnnnnnnnnnnnnnnnnnnnnnnnnnnnnnnnnnnnnnnnnnnnnnnnnnnnnnnnnnnnnnnnnnnnnnnnnnnnnnnnnnnnnnnnnnnnnnnnnnnnnnnnnnnnnnnnnnnnnnnnnnnnnnnnnnnnnnnnnnnnnnnnnnnnnnnnnnnnnnnnnnnnnnnnnnnnnnnnnnnnnnnnnnnnnnnnnnnnnnnnnnnnnnnnnnnnnnnnnnnnnnnnnnnnnnnnnnnnnnnnnnnnnnnnnnnnnnnnnnnnnnnnnnnnnnnnnnnnnnnnnnnnnnnnnnnnnnnnnnnnnnnnnnnnnnnnnnnnnnnnnnnnnnnnnnnnnnnnnnnnnnnnnnnnnnnnnnnnnnnnnnnnnnnnnnnnnnnnnnnnnnnnnnnnnnnnnnnnnnnnnnnnnnnnnnnnnnnnnnnnnnnnnnnnnnnnnnnnnnnnnnnnnnnnnnnnnnnnnnnnnnnnnnnnnnnnnnnnnnnnnnnnnnnnnnnnnnnnnnnnnnnnnnnnnnnnnnnnnnnnnnnnnnnnnnnnnnnnnnnnnnnnnnnnnnnnnnnnnnnnnnnnnnnnnnnnnnnnnnnnnnnnnnnnnnnnnnnnnnnnnnnnnnnnnnnnnnnnnnnnnnnnnnnnnnnnnnnnnnnnnnnnnnnnnnnnnnnnnnnnnnnnnnnnnnnnnnnnnnnnnnnnnnnnnnnnnnnnnnnnnnnnnnnnnnnnnnnnnnnnnnnnnnnnnnnnnnnnnnnnnnnnnnnnnnnnnnnnnnnnnnnnnnnnnnnnnnnnnnnnnnnnnnnnnnnnnnnnnnnnnnnnnnnnnnnnnnnnnnnnnnnnnnnnnnnnnnnnnnnnnnnnnnnnnnnnnnnnnnnnnnnnnnnnnnnnnnnnnnnnnnnnnnnnnnnnnnnnnnnnnnnnnnnnnnnnnnnnnnnnnnnnnnnnnnnnnnnnnnnnnnnnnnnnnnnnnnnnnnnnnnnnnnnnnnnnnnnnnnnnnnnnnnnnnnnnnnnnnnnnnnnnnnnnnnnnnnnnnnnnnnnnnnnnnnnnnnnnnnnnnnnnnnnnnnnnnnnnnnnnnnnnnnnnnnnnnnnnnnnnnnnnnnnnnnnnnnnnnnnnnnnnnnnnnnnnnnnnnnnnnnnnnnnnnnnnnnnnnnnnnnnnnnnnnnnnnnnnnnnnnnnnnnnnnnnnnnnnnnnnnnnnnnnnnnnnnnnnnnnnnnnnnnnnnnnnnnnnnnnnnnnnnnnnnnnnnnnnnnnnnnnnnnnnnnnnnnnnnnnnnnnnnnnnnnnnnnnnnnnnnnnnnnnnnnnnnnnnnnnnnnnnnnnnnnnnnnnnnnnnnnnnnnnnnnnnnnnnnnnnnnnnnnnnnnnnnnnnnnnnnnnnnnnnnnnnnnnnnnnnnnnnnnnnnnnnnnnnnnnnnnnnnnnnnnnnnnnnnnnnnnnnnnnnnnnnnnnnnnnnnnnnnnnnnnnnnnnnnnnnnnnnnnnnnnnnnnnnnnnnnnnnnnnnnnnnnnnnnnnnnnnnnnnnnnnnnnnnnnnnnnnnnnnnnnnnnnnnnnnnnnnnnnnnnnnnnnnnnnnnnnnnnnnnnnnnnnnnnnnnnnnnnnnnnnnnnnnnnnnnnnnnnnnnnnnnnnnnnnnnnnnnnnnnnnnnnnnnnnnnnnnnnnnnnnnnnnnnnnnnnnnnnnnnnnnnnnnnnnnnnnnnnnnnnnnnnnnnnnnnnnnnnnnnnnnnnnnnnnnnnnnnnnnnnnnnnnnnnnnnnnnnnnnnnnnnnnnnnnnnnnnnnnnnnnnnnnnnnnnnnnnnnnnnnnnnnnnnnnnnnnnnnnnnnnnnnnnnnnnnnnnnnnnnnnnnnnnnnnnnnnnnnnnnnnnnnnnnnnnnnnnnnnnnnnnnnnnnnnnnnnnnnnnnnnnnnnnnnnnnnnnnnnnnnnnnnnnnnnnnnnnnnnnnnnnnnnnnnnnnnnnnnnnnnnnnnnnnnnnnnnnnnnnnnnnnnnnnnnnnnnnnnnnnnnnnnnnnnnnnnnnnnnnnnnnnnnnnnnnnnnnnnnnnnnnnnnnnnnnnnnnnnnnnnnnnnnnnnnnnnnnnnnnnnnnnnnnnnnnnnnnnnnnnnnnnnnnnnnnnnnnnnnnnnnnnnnnnnnnnnnnnnnnnnnnnnnnnnnnnnnnnnnnnnnnnnnnnnnnnnnnnnnnnnnnnnnnnnnnnnnnnnnnnnnnnnnnnnnnnnnnnnnnnnnnnnnnnnnnnnnnnnnnnnnnnnnnnnnnnnnnnnnnnnnnnnnnnnnnnnnnnnnnnnnnnnnnnnnnnnnnnnnnnnnnnnnnnnnnnnnnnnnnnnnnnnnnnnnnnnnnnnnnnnnnnnnnnnnnnnnnnnnnnnnnnnnnnnnnnnnnnnnnnnnnnnnnnnnnnnnnnnnnnnnnnnnnnnnnnnnnnnnnnnnnnnnnnnnnnnnnnnnnnnnnnnnnnnnnnnnnnnnnnnnnnnnnnnnnnnnnnnnnnnnnnnnnnnnnnnnnnnnnnnnnnnnnnnnnnnnnnnnnnnnnnnnnnnnnnnnnnnnnnnnnnnnnnnnnnnnnnnnnnnnnnnnnnnnnnnnnnnnnnnnnnnnnnnnnnnnnnnnnnnnnnnnnnnnnnnnnnnnnnnnnnnnnnnnnnnnnnnnnnnnnnnnnnnnnnnnnnnnnnnnnnnnnnnnnnnnnnnnnnnnnnnnnnnnnnnnnnnnnnnnnnnnnnnnnnnnnnnnnnnnnnnnnnnnnnnnnnnnnnnnnnnnnnnnnnnnnnnnnnnnnnnnnnnnnnnnnnnnnnnnnnnnnnnnnnnnnnnnnnnnnnnnnnnnnnnnnnnnnnnnnnnnnnnnnnnnnnnnnnnnnnnnnnnnnnnnnnnnnnnnnnnnnnnnnnnnnnnnnnnnnnnnnnnnnnnnnnnnnnnnnnnnnnnnnnnnnnnnnnnnnnnnnnnnnnnnnnnnnnnnnnnnnnnnnnnnnnnnnnnnnnnnnnnnnnnnnnnnnnnnnnnnnnnnnnnnnnnnnnnnnnnnnnnnnnnnnnnnnnnnnnnnnnnnnnnnnnnnnnnnnnnnnnnnnnnnnnnnnnnnnnnnnnnnnnnnnnnnnnnnnnnnnnnnnnnnnnnnnnnnnnnnnnnnnnnnnnnnnnnnnnnnnnnnnnnnnnnnnnnnnnnnnnnnnnnnnnnnnnnnnnnnnnnnnnnnnnnnnnnnnnnnnnnnnnnnnnnnnnnnnnnnnnnnnnnnnnnnnnnnnnnnnnnnnnnnnnnnnnnnnnnnnnnnnnnnnnnnnnnnnnnnnnnnnnnnnnnnnnnnnnnnnnnnnnnnnnnnnnnnnnnnnnnnnnnnnnnnnnnnnnnnnnnnnnnnnnnnnnnnnnnnnnnnnnnnnnnnnnnnnnnnnnnnnnnnnnnnnnnnnnnnnnnnnnnnnnnnnnnnnnnnnnnnnnnnnnnnnnnnnnnnnnnnnnnnnnnnnnnnnnnnnnnnnnnnnnnnnnnnnnnnnnnnnnnnnnnnnnnnnnnnnnnnnnnnnnnnnnnnnnnnnnnnnnnnnnnnnnnnnnnnnnnnnnnnnnnnnnnnnnnnnnnnnnnnnnnnnnnnnnnnnnnnnnnnnnnnnnnnnnnnnnnnnnnnnnnnnnnnnnnnnnnnnnnnnnnnnnnnnnnnnnnnnnnnnnnnnnnnnnnnnnnnnnnnnnnnnnnnnnnnnnnnnnnnnnnnnnnnnnnnnnnnnnnnnnnnnnnnnnnnnnnnnnnnnnnnnnnnnnnnnnnnnnnnnnnnnnnnnnnnnnnnnnnnnnnnnnnnnnnnnnnnnnnnnnnnnnnnnnnnnnnnnnnnnnnnnnnnnnnnnnnnnnnnnnnnnnnnnnnnnnnnnnnnnnnnnnnnnnnnnnnnnnnnnnnnnnnnnnnnnnnnnnnnnnnnnnnnnnnnnnnnnnnnnnnnnnnnnnnnnnnnnnnnnnnnnnnnnnnnnnnnnnnnnnnnnnnnnnnnnnnnnnnnnnnnnnnnnnnnnnnnnnnnnnnnnnnnnnnnnnnnnnnnnnnnnnnnnnnnnnnnnnnnnnnnnnnnnnnnnnnnnnnnnnnnnnnnnnnnnnnnnnnnnnnnnnnnnnnnnnnnnnnnnnnnnnnnnnnnnnnnnnnnnnnnnnnnnnnnnnnnnnnnnnnnnnnnnnnnnnnnnnnnnnnnnnnnnnnnnnnnnnnnnnnnnnnnnnnnnnnnnnnnnnnnnnnnnnnnnnnnnnnnnnnnnnnnnnnnnnnnnnnnnnnnnnnnnnnnnnnnnnnnnnnnnnnnnnnnnnnnnnnnnnnnnnnnnnnnnnnnnnnnnnnnnnnnnnnnnnnnnnnnnnnnnnnnnnnnnnnnnnnnnnnnnnnnnnnnnnnnnnnnnnnnnnnnnnnnnnnnnnnnnnnnnnnnnnnnnnnnnnnnnnnnnnnnnnnnnnnnnnnnnnnnnnnnnnnnnnnnnnnnnnnnnnnnnnnnnnnnnnnnnnnnnnnnnnnnnnnnnnnnnnnnnnnnnnnnnnnnnnnnnnnnnnnnnnnnnnnnnnnnnnnnnnnnnnnnnnnnnnnnnnnnnnnnnnnnnnnnnnnnnnnnnnnnnnnnnnnnnnnnnnnnnnnnnnnnnnnnnnnnnnnnnnnnnnnnnnnnnnnnnnnnnnnnnnnnnnnnnnnnnnnnnnnnnnnnnnnnnnnnnnnnnnnnnnnnnnnnnnnnnnnnnnnnnnnnnnnnnnnnnnnnnnnnnnnnnnnnnnnnnnnnnnnnnnnnnnnnnnnnnnnnnnnnnnnnnnnnnnnnnnnnnnnnnnnnnnnnnnnnnnnnnnnnnnnnnnnnnnnnnnnnnnnnnnnnnnnnnnnnnnnnnnnnnnnnnnnnnnnnnnnnnnnnnnnnnnnnnnnnnnnnnnnnnnnnnnnnnnnnnnnnnnnnnnnnnnnnnnnnnnnnnnnnnnnnnnnnnnnnnnnnnnnnnnnnnnnnnnnnnnnnnnnnnnnnnnnnnnnnnnnnnnnnnnnnnnnnnnnnnnnnnnnnnnnnnnnnnnnnnnnnnnnnnnnnnnnnnnnnnnnnnnnnnnnnnnnnnnnnnnnnnnnnnnnnnnnnnnnnnnnnnnnnnnnnnnnnnnnnnnnnnnnnnnnnnnnnnnnnnnnnnnnnnnnnnnnnnnnnnnnnnnnnnnnnnnnnnnnnnnnnnnnnnnnnnnnnnnnnnnnnnnnnnnnnnnnnnnnnnnnnnnnnnnnnnnnnnnnnnnnnnnnnnnnnnnnnnnnnnnnnnnnnnnnnnnnnnnnnnnnnnnnnnnnnnnnnnnnnnnnnnnnnnnnnnnnnnnnnnnnnnnnnnnnnnnnnnnnnnnnnnnnnnnnnnnnnnnnnnnnnnnnnnnnnnnnnnnnnnnnnnnnnnnnnnnnnnnnnnnnnnnnnnnnnnnnnnnnnnnnnnnnnnnnnnnnnnnnnnnnnnnnnnnnnnnnnnnnnnnnnnnnnnnnnnnnnnnnnnnnnnnnnnnnnnnnnnnnnnnnnnnnnnnnnnnnnnnnnnnnnnnnnnnnnnnnnnnnnnnnnnnnnnnnnnnnnnnnnnnnnnnnnnnnnnnnnnnnnnnnnnnnnnnnnnnnnnnnnnnnnnnnnnnnnnnnnnnnnnnnnnnnnnnnnnnnnnnnnnnnnnnnnnnnnnnnnnnnnnnnnnnnnnnnnnnnnnnnnnnnnnnnnnnnnnnnnnnnnnnnnnnnnnnnnnnnnnnnnnnnnnnnnnnnnnnnnnnnnnnnnnnnnnnnnnnnnnnnnnnnnnnnnnnnnnnnnnnnnnnnnnnnnnnnnnnnnnnnnnnnnnnnnnnnnnnnnnnnnnnnnnnnnnnnnnnnnnnnnnnnnnnnnnnnnnnnnnnnnnnnnnnnnnnnnnnnnnnnnnnnnnnnnnnnnnnnnnnnnnnnnnnnnnnnnnnnnnnnnnnnnnnnnnnnnnnnnnnnnnnnnnnnnnnnnnnnnnnnnnnnnnnnnnnnnnnnnnnnnnnnnnnnnnnnnnnnnnnnnnnnnnnnnnnnnnnnnnnnnnnnnnnnnnnnnnnnnnnnnnnnnnnnnnnnnnnnnnnnnnnnnnnnnnnnnnnnnnnnnnnnnnnnnnnnnnnnnnnnnnnnnnnnnnnnnnnnnnnnnnnnnnnnnnnnnnnnnnnnnnnnnnnnnnnnnnnnnnnnnnnnnnnnnnnnnnnnnnnnnnnnnnnnnnnnnnnnnnnnnnnnnnnnnnnnnnnnnnnnnnnnnnnnnnnnnnnnnnnnnnnnnnnnnnnnnnnnnnnnnnnnnnnnnnnnnnnnnnnnnnnnnnnnnnnnnnnnnnnnnnnnnnnnnnnnnnnnnnnnnnnnnnnnnnnnnnnnnnnnnnnnnnnnnnnnnnnnnnnnnnnnnnnnnnnnnnnnnnnnnnnnnnnnnnnnnnnnnnnnnnnnnnnnnnnnnnnnnnnnnnnnnnnnnnnnnnnnnnnnnnnnnnnnnnnnnnnnnnnnnnnnnnnnnnnnnnnnnnnnnnnnnnnnnnnnnnnnnnnnnnnnnnnnnnnnnnnnnnnnnnnnnnnnnnnnnnnnnnnnnnnnnnnnnnnnnnnnnnnnnnnnnnnnnnnnnnnnnnnnnnnnnnnnnnnnnnnnnnnnnnnnnnnnnnnnnnnnnnnnnnnnnnnnnnnnnnnnnnnnnnnnnnnnnnnnnnnnnnnnnnnnnnnnnnnnnnnnnnnnnnnnnnnnnnnnnnnnnnnnnnnnnnnnnnnnnnnnnnnnnnnnnnnnnnnnnnnnnnnnnnnnnnnnnnnnnnnnnnnnnnnnnnnnnnnnnnnnnnnnnnnnnnnnnnnnnnnnnnnnnnnnnnnnnnnnnnnnnnnnnnnnnnnnnnnnnnnnnnnnnnnnnnnnnnnnnnnnnnnnnnnnnnnnnnnnnnnnnnnnnnnnnnnnnnnnnnnnnnnnnnnnnnnnnnnnnnnnnnnnnnnnnnnnnnnnnnnnnnnnnnnnnnnnnnnnnnnnnnnnnnnnnnnnnnnnnnnnnnnnnnnnnnnnnnnnnnnnnnnnnnnnnnnnnnnnnnnnnnnnnnnnnnnnnnnnnnnnnnnnnnnnnnnnnnnnnnnnnnnnnnnnnnnnnnnnnnnnnnnnnnnnnnnnnnnnnnnnnnnnnnnnnnnnnnnnnnnnnnnnnnnnnnnnnnnnnnnnnnnnnnnnnnnnnnnnnnnnnnnnnnnnnnnnnnnnnnnnnnnnnnnnnnnnnnnnnnnnnnnnnnnnnnnnnnnnnnnnnnnnnnnnnnnnnnnnnnnnnnnnnnnnnnnnnnnnnnnnnnnnnnnnnnnnnnnnnnnnnnnnnnnnnnnnnnnnnnnnnnnnnnnnnnnnnnnnnnnnnnnnnnnnnnnnnnnnnnnnnnnnnnnnnnnnnnnnnnnnnnnnnnnnnnnnnnnnnnnnnnnnnnnnnnnnnnnnnnnnnnnnnnnnnnnnnnnnnnnnnnnnnnnnnnnnnnnnnnnnnnnnnnnnnnnnnnnnnnnnnnnnnnnnnnnnnnnnnnnnnnnnnnnnnnnnnnnnnnnnnnnnnnnnnnnnnnnnnnnnnnnnnnnnnnnnnnnnnnnnnnnnnnnnnnnnnnnnnnnnnnnnnnnnnnnnnnnnnnnnnnnnnnnnnnnnnnnnnnnnnnnnnnnnnnnnnnnnnnnnnnnnnnnnnnnnnnnnnnnnnnnnnnnnnnnnnnnnnnnnnnnnnnnnnnnnnnnnnnnnnnnnnnnnnnnnnnnnnnnnnnnnnnnnnnnnnnnnnnnnnnnnnnnnnnnnnnnnnnnnnnnnnnnnnnnnnnnnnnnnnnnnnnnnnnnnnnnnnnnnnnnnnnnnnnnnnnnnnnnnnnnnnnnnnnnnnnnnnnnnnnnnnnnnnnnnnnnnnnnnnnnnnnnnnnnnnnnnnnnnnnnnnnnnnnnnnnnnnnnnnnnnnnnnnnnnnnnnnnnnnnnnnnnnnnnnnnnnnnnnnnnnnnnnnnnnnnnnnnnnnnnnnnnnnnnnnnnnnnnnnnnnnnnnnnnnnnnnnnnnnnnnnnnnnnnnnnnnnnnnnnnnnnnnnnnnnnnnnnnnnnnnnnnnnnnnnnnnnnnnnnnnnnnnnnnnnnnnnnnnnnnnnnnnnnnnnnnnnnnnnnnnnnnnnnnnnnnnnnnnnnnnnnnnnnnnnnnnnnnnnnnnnnnnnnnnnnnnnnnnnnnnnnnnnnnnnnnnnnnnnnnnnnnnnnnnnnnnnnnnnnnnnnnnnnnnnnnnnnnnnnnnnnnnnnnnnnnnnnnnnnnnnnnnnnnnnnnnnnnnnnnnnnnnnnnnnnnnnnnnnnnnnnnnnnnnnnnnnnnnnnnnnnnnnnnnnnnnnnnnnnnnnnnnnnnnnnnnnnnnnnnnnnnnnnnnnnnnnnnnnnnnnnnnnnnnnnnnnnnnnnnnnnnnnnnnnnnnnnnnnnnnnnnnnnnnnnnnnnnnnnnnnnnnnnnnnnnnnnnnnnnnnnnnnnnnnnnnnnnnnnnnnnnnnnnnnnnnnnnnnnnnnnnnnnnnnnnnnnnnnnnnnnnnnnnnnnnnnnnnnnnnnnnnnnnnnnnnnnnnnnnnnnnnnnnnnnnnnnnnnnnnnnnnnnnnnnnnnnnnnnnnnnnnnnnnnnnnnnnnnnnnnnnnnnnnnnnnnnnnnnnnnnnnnnnnnnnnnnnnnnnnnnnnnnnnnnnnnnnnnnnnnnnnnnnnnnnnnnnnnnnnnnnnnnnnnnnnnnnnnnnnnnnnnnnnnnnnnnnnnnnnnnnnnnnnnnnnnnnnnnnnnnnnnnnnnnnnnnnnnnnnnnnnnnnnnnnnnnnnnnnnnnnnnnnnnnnnnnnnnnnnnnnnnnnnnnnnnnnnnnnnnnnnnnnnnnnnnnnnnnnnnnnnnnnnnnnnnnnnnnnnnnnnnnnnnnnnnnnnnnnnnnnnnnnnnnnnnnnnnnnnnnnnnnnnnnnnnnnnnnnnnnnnnnnnnnnnnnnnnnnnnnnnnnnnnnnnnnnnnnnnnnnnnnnnnnnnnnnnnnnnnnnnnnnnnnnnnnnnnnnnnnnnnnnnnnnnnnnnnnnnnnnnnnnnnnnnnnnnnnnnnnnnnnnnnnnnnnnnnnnnnnnnnnnnnnnnnnnnnnnnnnnnnnnnnnnnnnnnnnnnnnnnnnnnnnnnnnnnnnnnnnnnnnnnnnnnnnnnnnnnnnnnnnnnnnnnnnnnnnnnnnnnnnnnnnnnnnnnnnnnnnnnnnnnnnnnnnnnnnnnnnnnnnnnnnnnnnnnnnnnnnnnnnnnnnnnnnnnnnnnnnnnnnnnnnnnnnnnnnnnnnnnnnnnnnnnnnnnnnnnnnnnnnnnnnnnnnnnnnnnnnnnnnnnnnnnnnnnnnnnnnnnnnnnnnnnnnnnnnnnnnnnnnnnnnnnnnnnnnnnnnnnnnnnnnnnnnnnnnnnnnnnnnnnnnnnnnnnnnnnnnnnnnnnnnnnnnnnnnnnnnnnnnnnnnnnnnnnnnnnnnnnnnnnnnnnnnnnnnnnnnnnnnnnnnnnnnnnnnnnnnnnnnnnnnnnnnnnnnnnnnnnnnnnnnnnnnnnnnnnnnnnnnnnnnnnnnnnnnnnnnnnnnnnnnnnnnnnnnnnnnnnnnnnnnnnnnnnnnnnnnnnnnnnnnnnnnnnnnnnnnnnnnnnnnnnnnnnnnnnnnnnnnnnnnnnnnnnnnnnnnnnnnnnnnnnnnnnnnnnnnnnnnnnnnnnnnnnnnnnnnnnnnnnnnnnnnnnnnnnnnnnnnnnnnnnnnnnnnnnnnnnnnnnnnnnnnnnnnnnnnnnnnnnnnnnnnnnnnnnnnnnnnnnnnnnnnnnnnnnnnnnnnnnnnnnnnnnnnnnnnnnnnnnnnnnnnnnnnnnnnnnnnnnnnnnnnnnnnnnnnnnnnnnnnnnnnnnnnnnnnnnnnnnnnnnnnnnnnnnnnnnnnnnnnnnnnnnnnnnnnnnnnnnnnnnnnnnnnnnnnnnnnnnnnnnnnnnnnnnnnnnnnnnnnnnnnnnnnnnnnnnnnnnnnnnnnnnnnnnnnnnnnnnnnnnnnnnnnnnnnnnnnnnnnnnnnnnnnnnnnnnnnnnnnnnnnnnnnnnnnnnnnnnnnnnnnnnnnnnnnnnnnnnnnnnnnnnnnnnnnnnnnnnnnnnnnnnnnnnnnnnnnnnnnnnnnnnnnnnnnnnnnnnnnnnnnnnnnnnnnnnnnnnnnnnnnnnnnnnnnnnnnnnnnnnnnnnnnnnnnnnnnnnnnnnnnnnnnnnnnnnnnnnnnnnnnnnnnnnnnnnnnnnnnnnnnnnnnnnnnnnnnnnnnnnnnnnnnnnnnnnnnnnnnnnnnnnnnnnnnnnnnnnnnnnnnnnnnnnnnnnnnnnnnnnnnnnnnnnnnnnnnnnnnnnnnnnnnnnnnnnnnnnnnnnnnnnnnnnnnnnnnnnnnnnnnnnnnnnnnnnnnnnnnnnnnnnnnnnnnnnnnnnnnnnnnnnnnnnnnnnnnnnnnnnnnnnnnnnnnnnnnnnnnnnnnnnnnnnnnnnnnnnnnnnnnnnnnnnnnnnnnnnnnnnnnnnnnnnnnnnnnnnnnnnnnnnnnnnnnnnnnnnnnnnnnnnnnnnnnnnnnnnnnnnnnnnnnnnnnnnnnnnnnnnnnnnnnnnnnnnnnnnnnnnnnnnnnnnnnnnnnnnnnnnnnnnnnnnnnnnnnnnnnnnnnnnnnnnnnnnnnnnnnnnnnnnnnnnnnnnnnnnnnnnnnnnnnnnnnnnnnnnnnnnnnnnnnnnnnnnnnnnnnnnnnnnnnnnnnnnnnnnnnnnnnnnnnnnnnnnnnnnnnnnnnnnnnnnnnnnnnnnnnnnnnnnnnnnnnnnnnnnnnnnnnnnnnnnnnnnnnnnnnnnnnnnnnnnnnnnnnnnnnnnnnnnnnnnnnnnnnnnnnnnnnnnnnnnnnnnnnnnnnnnnnnnnnnnnnnnnnnnnnnnnnnnnnnnnnnnnnnnnnnnnnnnnnnnnnnnnnnnnnnnnnnnnnnnnnnnnnnnnnnnnnnnnnnnnnnnnnnnnnnnnnnnnnnnnnnnnnnnnnnnnnnnnnnnnnnnnnnnnnnnnnnnnnnnnnnnnnnnnnnnnnnnnnnnnnnnnnnnnnnnnnnnnnnnnnnnnnnnnnnnnnnnnnnnnnnnnnnnnnnnnnnnnnnnnnnnnnnnnnnnnnnnnnnnnnnnnnnnnnnnnnnnnnnnnnnnnnnnnnnnnnnnnnnnnnnnnnnnnnnnnnnnnnnnnnnnnnnnnnnnnnnnnnnnnnnnnnnnnnnnnnnnnnnnnnnnnnnnnnnnnnnnnnnnnnnnnnnnnnnnnnnnnnnnnnnnnnnnnnnnnnnnnnnnnnnnnnnnnnnnnnnnnnnnnnnnnnnnnnnnnnnnnnnnnnnnnnnnnnnnnnnnnnnnnnnnnnnnnnnnnnnnnnnnnnnnnnnnnnnnnnnnnnnnnnnngatcatgcagctcttccaggcccactgcttcttcctgtccactaggccacagccgccctccaggcccactatgcacacatcttcccctccaaggtttgttctgcccctgccctgactcccagccctgtgggggtcctgaccgcacctcacctggctcagactcttgacgctgccctggctgccccaccactgcttctgcccgagagtcacgtgaggctgagagtaggggcaggggcagcagtggtgccagttggggggcggtccagtgggaggagcctcagcctcgcgggctgctccgtgggactgatgactgcatgatcttctgggcacctcacggatcttcaactgcaggtgaaacggatgctggtggtgggtgcagggccgctgggagctgctgcatggttcccagaggctggactggggcaggtgccaactgaagctgctggggcagcatgggcaggatgttctgcacacaaaccttggagaagaagatgtgtgcatagcaggtccactgctgctgcccctgccctgactcccagccctgcctgaccccacctcaacctgctcaggctctggcgcaaccctggctgccctgccactgcctctgccccagagttggggccttgacaacctggttggaaggggacaccccagccctgcctcaacacctgggggtctccataactaccacaggcaggtgggcaaccccaaagatcccaggactcacagtaccccctgagaacatggacagtatgtgggggtagaaatggagggcaggatggttatcttctcccaggtgaagccatttaatcctttcagtttgggacggagtaaggccttcctctttttttttttttttttttttttgagaccgagtcttgctctgtcacccaggctggagtgcagtggtgcgatcttggctcactgcaacctcttcccgccgggttcacgccattctcctgcctcagccttccgggtagctaggattacaggtggacgctaccacgtccggctaatttttgtatttttagtacagacggggcttcatcatcttggccaggctgatttcgatctcctgacatcgtgatctgcctgcctccccctcccaaagtgctgggattacaggcgtgagccaccacgcctggccaaggcctgctcctcttatctataccccctacccctgcagctgtgccgggggaaagctgggcagtttccctcctccgagcccctgtacataccatgaattgtgggaccttcagagcttttcacttttcagaaaatagctcctgctggggctacaagatggagtgtgaagagggccttgggccacagggaggcgcctgtggactagggggagttcatgcaccccttctttccccagaggggctggactcaggtgagtatgggggtgggggctcctacacttcgacacaggcagcgggagggttttctccccattccctctgcactcccaacttgagctatactttttaagaaagtgattcaccctgcctttgcccccttccccagaacagaacacgttgatcgtgggcgatatttttcattgtgccaaaaagttgccatgaccgtcattaaacctgtttaacaccaaataataaggaaaataaaataaaaaattcgggcttggcgcagaaactcactccaaataaattacctaccaaaatatttacataatggtggaaatattccaaaattcaatattttgggatttatacacaaaagataaacaaattagaggccaagaggctgccggaagggaaaaacggggcctggaatggccgacgtgaggaatgagctgggcctaaagaggccactggcaggcaggagctggacctgccgaagtggccgaaaggcaggagctttggactggggaggccgcagtgagacgagagctagctgggcgtggagagtccgctgtgaggccgaggccgaggccgggcccgtgcaggccttcgagaggcaggaggccgggcctgcaaaggccgcctggagatcaagttctgcgcctgaagaggctgccaaaagtcaaaagcggggcctgggaaggccgccgagagccatgagctgggctgggccgaaagaggccactgggaggcaggaggagctgggcctggagaggctgactcgaggaagttttgcacctggagaggccgtcgagaggacggagctgggcccagggaggccgacttgctgctcttccaggcccacttccaggccgacttgaggacgacttgggcctgcagaggccgccgggaggctggagctaagcctggagagactgacttcgggacgatttgggcctgcagaggccgccgggaggcccaagctgggcctagaggagcccaccgaccggaggccatttggggcctgcagatgtcatcggagggccaggagctgagcctggagaggccaccgcgaggcctgagctgggcctggggagcttggcttagggaagttgtgggcctaccagggccgctgggagctgggcaggagctgagtccaaagacgttgttgggacctggagtcgggccagagtccggcctggagatgcagccaggaggaagagctgggcccggagggggcgccgggaggctgcaagtgggtctgagaggccaacttgaggaggcctggcctctgcctcccgcattgcccagctgttcctcctggctgcatctcccacctcccagcaaacaagctcttttggctcagctcccgcctgcctttgtagaccccgaagtttctgcaaccaagctcttcagacccacatcccttctcccagtgactgaacagtcccagctccggctggagaagggcgtctgcagaccccgctgttgcctcccaggggagtctccaggcccagctctcgccccaccgcgacctcccaggcccaagtccctgcctacctcccagcagcccgagtgcgatcctgttcctccctcacggtggcctgttgaggcagggggtcacgctgacctctgtccgcgtgggaggggccggtgtgaggcaagggctcacactgacctctctcagcgtgggaggggccggtgtgaggcaaggggctcacgctgacctctgtccgcgtgggaggggccggtgtgaggcaagggctcacactgacctctctcagcgtgggaggggccggtgtgaggcaaggggctcacgctgacctctgtccacgtgggaggggccggggtgaggcaaggggctcacgctgacctctgtccgcgtgggaggggctggtgtgaggcaagggctcacactgacctctctcagcgtgggaggagccagtgtgaggcaggggctcacgcctctgggcagggtaccagaggcatgagttgggcatcaacaggccaccgtgagggaggagctgggccgcacgcgggctgctgggaggcaggcagggacttggccccgggaggccgccgtgggggcaagagctgggcctggagaggcccctgggaggcaagggcggggcctgcagaggctgttctccaaccagtgctagaactgtacaggccaccaggaggcaggaggtgggccctcagagcttggctggagaaagttcagggcctacaaaggcggttgggagctgggcaggagttgagccaaaagagcttgcttacttgctgggaggcagggccgggagagcccgacttcaggacaacttgggcctgcggcggtcgccgggaggcccaaccttggcgtggaggagcccaccgaccggagaccatttggggcctggagatgccataggagggcaggagctcatcctggagaggccaccgtgaggcctgacctgggcctggggagcttggcttgaggaagctgtgggccgaccaaggccgccaggagatgggtaggcactgagtccaaagaggttgttgagaggcaggaatcgggcctggagacccaaccaggaagaagagctgggcccggagaggatgcccggagggtgcaagtgggtctggagaggccgacttgaggaggttctgggcccggagaggccgccggaagggaaaactgggcctggaaaggccgttgtcaggaatgagccccatgggcctgaagaggccactggcaggcgggagctgggcctgccgaagcggccgagaggcaggagctttggactcgggaggccgcagtgaagcaacagctagctgggcgtggagagtccgctgtgaggcagaggctgggcctgtgcaggccttcgggaggcaggaggctgggccttgtcgaggcctgcagaggccaccgaaagtcaaaagcggggcttgggaaggccgccgggaggcatgagctgggctgggctgaaagaggccactgggaggccggaggagctgggcctggagaggctgccgaaaggcaggagcttcgcctgaggatgccacagtgagacaccatctgggtctggagggtccactgtgaggcagaggctgacctgtagagtccgacagtagacagaagttgggcaaaaggctgatttgaggaagttttgggcttcaagagtcagccacgaggcaggcactaggcctggaaatggcctcacagtcatgagttgggcctaaatgggccactgtgagggaggagctgtgcctgttgaggctgctggcaggcaggcagaaatttggcctggggcagccgccatgaggcaagagctgggcctggaaaaagcccctgggaggcaagagcagggcctgcagaggctgttctcaagtcaaagctgggcctgttgatgccaccgggaagcagaaggtgggcctggagagtttgacttgaggaagttttgggcctacattggccgccatgagctggacaggaactgggccaaaaaaggctgttgtgaggcagcagttgtgcctgtagacccagccaagaggaagaggtgggcctggagaagcccccatgaggcagaggttgggcctgtagacgctgacaggaggcaggaggtgggcctggacaggtcaacttgaggagattttgggccttcataggccaccaggaggcagcagttgggactagagagtctgacttgagtaagttttgggcccggagatgacgtcctgggacaggagttgggcgtggagaggccaccgtgaggcataagctggatgtagagaggccagtgtgagacaagacctgggcctgtctaggctgctgggagacaggcaggaatctggccagggaaggttgccatgagacaaaagttgggcctggaaaggcccttgtgaagcatgagcttggcctaaagaggccactgggtggcaggagctgggtgtgtagaagctgctgaaaggttgggagcttggcttgggggatccacagtgaggtagatgctgggcgtaaagaatctgctgtgaggcagacgttcggactgtagaggctgacgggaggcagaggctgggcctggaggggccaccaagatgcaggagctgggcctggagaggctgcaaagaagcatgagctgggcctggtgaggttgacttgagaaagttcagggcctggagagaaggctgggaggcaggagctgggtctaaagaggccattgtaacgatggagctgtgcctgtggaggctgttgtgaggcagtagcctcatctgcggaggctgccgtgacgtagggtatgggcctaaataggccattgagagtcatgagcttggtctgtagaggctgactggagaaagttctgggcctggagaggctgccgggaggtaggagctgggccaaaagatgtaagcacatttgtatttattaggcactttatttccattattacactgtaatatataataaaataattatagaactcaccataatgtagaatcagtgggcgtgttaagcttgttttcctgcaactggatggtcccacctgagcgtgatgggagaaagtgacagatcaataggtattagattctcataaggacagcgcaacctcgatccctcacatgcacggttcacaacagggtgcgttctcctatgagcatctaatgctgctgctcatctgagaaggtggagctcaggcgggaatgtgagcaaaggggagtggctgtaaatacagacgaagcttccctcactccctcactcgacaccactcacctcctgctgtgtggctccttgcggctccatggctcaggggttggggacccctgctcaagtgcatccaaagcgacccttcccacaccagtcttcacagtggtcaagggcagcaaccacttagctcccaaggcatgtgcctcagctggcatttcgtcacaatcaacagtaagtggtagcttgagtcactgtgaggtcacctactggaaatcaccagcaccccatttcccactggcaaagagctcagcactaccccctgggaaaccacacctatgcccaaatcccatctgtgtgggtttacctcctgggacccttcctaacatattagtcagagtccaatcaggaagcataaaccactcaaaagtttaaagtggtaaaatttaatacagagaattattcattataacaggtgaacagcataatgagagattggctagcacagagtaaagagaactctagagaatatgggactagcccaggccaggcatggtggctcatgcctgaaattccagccattacagaagctaatgcaggaggactgcttaaggccaggagctagagaccgctctggacgacacagtgagaccctgtctctatccaaaaggagaaaaaagttagctgggggtggtgctgcacacttgtagtcccagctactcggaatgctgaagtttgagcctgggaggtcaaggctgcagtgaggcatgattatgccactacagtccagccggatgacagagcaagaccctgtctcaaagaacaaaaccacaacaaccatttacagacagaaaagaaatagagctaataagctgaggaaagatgttgaaatgtgacaagtaaagtaatatgaggtcttttgtctatttaaaataatcaaacaaaaaatggcttacgaaattataataccctgtgctggcaaaggtgcagtgaaatgggcactttcttatactatgaggggtggttaaattgtgtataagccttcccgggtaaagcctgtcaattttttaaaataatggagacagggtctcaccatactgccatactgcctcctccaactcttggcctcaagcaatcctcctctcttagcctcccaaagtgctaagattatagctgggaggcacccaaaaccctgtcaatttacatcaagggtaaggagaatgtccattcaccatgactcacagtaatcttacttctggggagacaattcaatctaagcaaaaggtcatctgtacacacacagtaaaaatctgggagtaactgaagacagagttggtaagtgaaataagaaacagttataagaaattaaactatggtatcaataggcacctggtaaaaggtcagttgatgttgctgctgcttttttgttgttttgagacagggtctcactctgtcacccaggctggagtgcagaggcctgatcatgactcactgcagtctcagcctccctgggctcaagtgatcctcccacctcagcctcccaagtagctgggactacaggaacatgccaccacactaggctaattcatgtatttttctgtagggatggtgactccccctttgtttccaaggcctatcgcaaactcttggcctcaagccatcctcctgcctcagcctcccaaagtgttgcaattaccagtgtgagccaccacatctggccagctgctacttttatcaatattattcttattccactcaattaaaaattattattttcaaggctatgcaacagtatgtatcctacagcgtaattgtaaaaacatacacagtcctcatccctcagtatacagaattagttccagccccccatctctgcatataccaaaatccatgcttactcacgtttcgctgtcacccctctagaatccacgtatacgaaaattccaaatgttagttgggcatagtggcaagcacctgtagtctcagccacgtgggaggttgaggtgggaggatcgcttcagcctggaaggttgaggctgcagtcagctgcaatagcactactacactccagccttggacaacagagggagaccctgtctcagaacaaaaaaaataaataaataaaaaataaaacaggttagaaactgtgatgaggtctgttgggcaaaattccatataagcaaagtataaattaataaagcaaatcgtgataaatcagtacgattgactttctggagtttctgacaataaaagtaaggaaaatgcagaacacaaagacagagagtaaaaagagaaattaggaaagcattctacatgttgaataggaagacactggccatgttcgtgcagcggcagtatgtcgtgacatgacataccttggagagaagttaacagatgaggaagttgataaaaatcatcagagaagcaaaatactggtagcgacactcaagtaaaccatgaaatttccataacttatgtcagcaaagtgggaatattgtacagtgtgtgttgaagttcctatacaacattgtttatctgccttttgtttgtttgtaaggaatgtatatactaaaagttcttcttgctgtcaaaagaatatgtgtgaataagtcattttaacttattcttctgtttttcttttatcttcctgccatcatcccacagccttactttagaaatttcttttttagaaaattgaacaagtgctccctgtggtggcacatacctcaaggatgggaggcaggggtggaagggtcacttgaggccattagtttgacaccagcctggccaacaaagtgagaccccgtgtctacaaaacaatttaaaaattagccaagtatcgtcatgtatacctacagtcccagctacctgaacttactgagaaagttcagagcctggagagaaggctgggaggcaggagctgggtctaaagaggccattgtaacgatggagctgtgcccgtggaggctgttgtgaggcagtagcctcatctgcggaggctgccgtgacgtagggtatgggcctaaataggccattgagagtcatgagcttggtctgtagaggctgactggagaaagttctgggcctggagaggctgccgggaggtaggagctgggccaaaagatgtaagcacatttgcatttattaggcactttatttccattattacactgtaatatataataaaataattatagaactcaccataatgtagaatcagtgggcgtgttaagcttgttttcctgcaactggatggtcccacctgagcgtgatgggagaaagtgacagatcaataggtattagattctcataaggacagcgcaacctagatccctcacatgcacggttcacaacagggtgcgttctcctatgagaatctaacgctgctgctcatctgagaaggtggagctcaggcgggaatgtgagcaaaggggagtggctgtaaatacagacgaagcttccctcactccctcactcgacaccgctcacctcctgctgtgtggctccttgcggctacatggctcaggggttggggacccctgctcaagtgcatccaaagcgacccttcccacaccagtcttcacagtggtcaagggcagcaaccacttagctcccaaggcatgtgcctcagctggcatttcgtcacaatcaacagtaagtggtagcttgagtcactgtgaggtcacctactggaaatcaccagcatcccatttcccactggcaaagagctcagcactgccccctggtaaaccaaacctatgcccaaatcccatctgtgtgggtgtatctcctgggacccttcctaacatattagtcagagtccaatcaggaagcataaaccactcaaaagtttaaagtggtaaaatttaatacagagaattattcattataacaggtgaacagcataatgagagattggctagcacaaagtaaagagaactctagagaatataggactagcccaggccaggcatggtggctcaggcctgaaattccagcaatttgagaagctaatgcaggaggattgcttaaggccaggagctagagaccggtctggacaacagagtgagaccctgtctctatccaaaggaagaaaaaagttagctggtggtggtagtgcacacttgtagtcccagctactcggaatgctgaagtttgagcctgggaggtcaaggctgcagtgaggcatgattatgccactacagtccagcctggtgacagagcaagaccctgtctcaaagaacaaaaccacaacaaccatttacagacagaaaagaaatagagctaataagctgaggaaagatgttgaaatgtgacaagtaaagtaatatgagttcttttgtctatgtaaaataatcaaacaaaaaatgacttactaaattataataccctgtgctggcaaaggtgcagtgaaatgggcaccttcttatactatgaggggtgtttaaattgtgtataagccttcccgggtaaagcctgtcaattttttaaaataatggagacagggtctcaccatactgccatactgcctcctccaactcttggcctcaagcaatcctcctctcttagcctcccaaagtgctaagattatagctgggaggcacccaaaaccctgtcaatttacatcaagggtaaggagaatgtccattcaccatgactcacagtaatcttacttctggggagacaattcaatctaagcaaaaggtcatctgtacacacacagtaaaaatctgggagtaactgaagacagagttggtaagtgaaataagaaacagttataagaaattaaactatggtatcaataggcacctggtaaaaggtcagttgatgttgctgctgcttttttgttgttttgagacagggtctcactctgtcacccaggctggagtgcagaggcctgatcatgactcactgcagtctcagcctccctgggctcaagtgatcctcccacctcagcctcccaagtagctgggactacaggaacatgccaccacactaggctaattcatgtatttttctgtagggatggtgactccccctttgtttccaaggcctatcgcaaactcttggcctcaagccatcctcctgcctcagcctcccaaagtgttgcgattaccagtgtgagccaccacacctggccagctgctacttttatcaatattattcttattccactcaattaaaaattattattttcaaggctatgcaacagtatgtatcccacagcgtcattgtaaaaacatatagtcgtcgtccctcagtatacagaattagttccagccccccatctctgcatataccaaaatccatgcttactcacgtttcgctgtcacccctctggaatccacgtatacgaaaattccaaatgttagttgggcatagtggcaagcacctgtagtctcagccacgtgggaggttgaggtgggaggatcgcttcagcctggaaggttgaggctgcagtcagctgcgatggcactactacactccagccttggacaacagagggagaccctgtctcagaaaaaaaaaacaaaataaaacaggttagaaattgtaatgaggtctgctgggcaaaattccatataagcaaagtataaattaataaagcaaatcgtgataaattagtacgattgactttctggagtttctgacaataaaagtaaggaaaatgcagaacacaaagacagagagtaaaaagagaaattaggaaagcattctacatgttgaataggaagacactggccatgttcgtgcagcggcagtatgtcgtgacatgacataccttggagagaagttaacagatgaggaagttgataaaaatcatcagagaagcaaaatactggtagcgacactcaagtaaaccatgaaatttccataacttatgtcagcaaagtgggaatattgtacagtgtgtgttgaagttcctatacaacattgtttatctgccttttgtttgtttgtaaggaatgtatatactaaaagttcttcttgctgtcaaaagaatatgtgtgaataagtcattttaacttattcttctgtttttcttttatcttcctgccatcatcccacagccttactttagaaatttcttttttagaaaattgaacaagtgctccttgtggtggcacatgcctcgaggatgggaggcaggggtggaagggtcacttgaggccattagtttgacaccagcctggccaacaaagtgagaccccgtgtctacaaaacaatttaaaaattagccaagtatcatcatgtatacctacagtcccagctacctgaacttactgagaaagttcagagcctggagagaaggctgggaggcaggagctgggtctaaagaggccattgtaacgatggagctgtgcctgtggaggctgctgtgaggcagtaggctcatctgcggaggctgccgtgacgtagggtatgggcctaaataggccattgtgagtcatgagcttggtctgtagaggctgactggagaaagttctgggcctggagaggctgccgggaggtaggagctgggccaaaagatgtaagcacatttgcatttattaggcactttatttccattattacactgtaatatataataaaataattatagaactcaccataatgtagaatcagggggcgtgttaagcttgttttcctgcaactggatgttcccacctgagcgtgatgggagaaagtgacagatcaataggtattagattctcataaggacagcgcaacctagatccctcacatgcacggttcacaacagggtgcgttctcctatgagaatctaacgctgctgctcatctgagaaggtggagctcaggcgggaatgtgagcaaaggggagtggctgtaaatacagacgaagcttccctcactccctcactcgacacagctcacctcctgctgtgtggctccttgcggctacatggctcaggggttggggacccctgctcaagtgcatccaaagcgacccttcccaagccagtcttcacagtggtcaagggcagcaaccacttagctcccaaggcatgtgcctcagctggcatttcgtcacaatcaacagtaagtggtagcttgagtcactgtgaggtcacctactggaaatcaccagcatcccatttcccactggcaaagagctcagcactgccccctgggaaaccaaacctatgcccaaatcccatctgcgtgggtctacctcctgggacccttcctaacatataaccttcataacatacttgagaggctgaggtgagacaatcaatttagcccaggagtttgagatcagcctggacgacataactaaatctcatctctacaaggacgaggtgggaggatcacttgagcccaggaatttgtggccagcctgggcaacaaaagaagaccccatctggccaacatggccaacctggccaccacggtgaaactctgactctacaaaaatgatctgggcatgggtgacatgcatgtgtagtcctagctacttgggaggttgagatgggaggattgcttgatctcagaaggccaaagctatagtgagctatgatcacatcactgcactccagcctggatggcacagggagattctgtctcaaaaaaaagaaaagaaatatatatttaatctctgtccctggttcctggcacagagcttctaaagctcttacaaagacctcagtgatagatgtgacaggagcatcttttgttttaatatttggtcttggtcccaggtttctaacacaagagcctctaagaactttgggatctccagcatggtaagaatgcatttggggatgttgttgagatgactgggtgactgcaagctcctaaatttcttcaagaggagggctgattaccatgcaaccacatggtaagaggcttggaactttcagcctcatgcactgaactccagggggaagaggggctggagactgacttaatcaccaacagccaaaggttttatcaatcatgcttgcataataaagcctccataaacaccctgaaaggggtttgcagagctttcagggttgctggacacaggagatgctgggagggtcgcatgttcaacagagggcatgggagctctgtgcccctccgaacttaacttgccctgggtatctttcttttttttgagacaggatcaggctctgttgtccaagctggagtgcagtggcacaatctcagcttactgtaacctaagcctccccagtccccagctcaaggtatcctctcatctcagcttccctagtagttggaactctaggtgcacaacaccacaccagttattattattattttttaattttttatagagacaagttttcaccatgttgcccaggctggtctcaaactcctgagtttaagcgatcctcccaccttggcctcccaaagtgctgagattacaggcatgagccactgcatccagcatgcacgtctctttcattgactgtttctgagatgtatccttcacaatgaaccagtaataggaaatgaactggccagatgtggtggctcacatctgtaatcccagcactttcagaggctgaggtgggaggatcacttgagaccaggaatttgtggccagcctggccaacacaacaagaccccatctatacaaaaaataaaagaaactagccagatgtggtggtgcaggcatgtagtctcagctactagggaggctgaggtgggagaaccactggaacccagacaatcaaggctgcaatgagctatgactgcaccattgcacaccagcctgggcaacaaaataagaccctctctctcagaaaaaaagaaaataaactgtttttctgagttccgtaaactgttctagcaaattattaaacccaagaagacagttacgggaacccccgattggtaacaggttggtcaaaagtatggtgacaacttaggacttgccattgtcatctgaagtgaggatggcctcgtgggactgagcccctaacttgtggggtctgtgctaactccaggtagtgtcagaataaagtcatgggatacccagttaatatccagagcactgaagaatctggtgtagaaactccatacatacattcagtcggaagtgtgtgagtagagacaaacatgggcttttctgtcacctacctgcttaactgcataggagaggcaatatgtggtgctcatgaacaaagcaaacattaaagtcagaccagacccaacatttgactcagtcttaatatccaggtgagcctgcgcaaatcattcattattcctaaggttttcatcactccattcataaaatggggataactgtggcacctacatgtgattctgtgagaattaacgaaatattatgcttggggttattgtgatcattatacctgttccaaactatttgacaaggacagtgatggatgaagacatcaaaaaatcagaaactgcaatgaggtctctcaggcaaaattccatacaagcaaattactgtgtctacaaagcattcctgccacacttaattcaccattccctgaacagaatatgccatcttcgttgttcaggtctgtacagtgctggtgtcccttcccgggcagtttgcgctatcccatcccggcccattccccatccctccacctcccccttccctccccactctcatacaactcttcctcatctttcaggacttggcttcaatgtcaccttaactggaagcttctctcactctccagaagagcttcccattgcacctgatgcatgggaaacataatttgatcacttttaagttacagtccaaatctttttgtacctgaataacatgttgcccagtcagtctctcttcctggattcacaagtctttcatggtagatccagctggaagtgacaaaaagacatcttttgacataaagggatgacacagacagacataagttcttaaatgtcttaaatgtcatgtgaaaattaaacagaattcaaagacttgtggggagcacttaggaagttactgggaatgtcataaagggttaatttgtattttattttattttttgagacagtctcattctgtcacctaggctggagtgcagtggtgcaatcaggctcactgcagccttgaccacctgggctcaagtaatctcacttaatttttatttggtttaagaaagtcttggttgagggtggtggcttatgcctgtaatctcagcactttgggaggctgagagaggtatattacttgaggccaggagtttgaaatcagactgggcaatatattaagaccctgcctctaccaaaaaacagagtgaatgtgtggaagacaatttttccacagactgggaatgagggaataatttcaggatgattcaagtgcattacatatattgtgcactttatttctattattactacatagtaatatataatgaaatgattctacaactcactataacgtagactcagtgggatctctgagcttgttttcctgcaactagactgtccacctggggtgatgggagacagtaacagaatatcaggcattagattctcataaggagtacacaacctagatccctcgcatgcacacttcacaacagagtttgtgctcctatgacaatctaatgctgctgctgatctgacaggacatggagctcaggtggtcatgcaagtgatgggaggggctagaaatacagatgaagtttcccttcactcgcctgctgctcacctccagctctgtggccctgtggttggagaccgctgctcaagtgcatttgaaaggaaccatcccacgccattcttcagagtcatctttactgctgcagtggtcaacttgtagcacccctaagctcgcaggacatatgcttcaactggcatttcacaatcaacagtatgtggcagcttgagtcattgtgagctcacttcctggaaatcaccagcatcccatatcccattgcaaggagctcagcactgctccttggataaccaaacctattcccaaatcccatctgtgtgcgtctatctcctggtacccttcctagcatcaattctgtatttgtaggagtccaatcaggagacacaaaccactcaaaagtttaaactagaatgagcaagatggctcacacctgtaaccccagaactctgggaggccaaggtgggtggactgctttgagctcaggagtttgagaacagtctgggaaacatggcgaaacctcgtctctacaaaaaacacaaaaatcagctgggtgtggtggcacttacctgtaatcccagctactcgggaggctgaggcaggagaattgcttgagcctggcaggtggaggctgcagtgagcagaggttgtgccactgtactccagcctgggtgacagtgtgagacccggtatcaaaaagaaaaaacgtatatatatatatatatatatatatatatatatatatatatatatatatgtaaatttaatataaaaagtattaattttggccaggcaaaatggctcatgcctgtaatcccagcactttgggaggccaaggcagacagatcacctgaggtcaggagttcgagaccagcctgaccagcacagagaaaccccatctctactaaaaatacaaaattagctgggcatggtggcacatgcctgtaatcccaactactcgggaggctgaggcaggagaattgcttgaacccagaaggtggaggttgcgctgagccgagatagcaccattgcactccagcctgggcaacaagagtgaaactccatctcaaaaaaaaaaaaaaaaggtattaatttttacagaggatcagcacaatgagggacacactagcacaaagtaaagacaactctagagaatacggaactagcagaggccaggcattgtggctcatgcctgtaatcccagcaatttgggaagcctaggcaggaggatcgcttgaggccaggagttggagaccaatcagtgctaaatagtgagactctgtgtctaccaaaaaaaagagacattagccaggtgtggtggtggtgcacactcgtagttccagctacttgggagtctggggtgggagaaatcccttgagcctgggaagtctacactacagtgagccaagattgtgccactgcactccagcctgggcgacagagtgagaccctgtcttagaaagaaaaaagaaaagaaagtgttaatccccctatgggaatctcctcttctcctgccctctctggaacctcacttgtcagttcttcctcccactttcctgtatctttaacctatcccccacttttagctccttcccatcatcatttaaattactcaaacttcttctgttttaaaaacctctccctaaactcagggagaggtcttctgcacacacattgagccatctgctcttcctggtgccttctctacagcagcctgagccatgtctctaatctatgaatctcatcatgttactcccccatttacatcacttctccttgcctcagggattaagtccaaactccttaacagcccctgctctgccctgccttgcaaggcagcctcactgcttgcccctctccatttcatctgctatggagtccaactgagcctcatctgccccttgaacgcacactctttctcctctgggagtctctgaagtgggtaatatcctctgcttataatatgcttccccttaaacctctactctcttcctagctagctttgactcctctgtcacttgtccgctttggcatcacctcctcatagaagacttctatgactcccgagattctcaggagcatggcaggtgaagtgctcctcccatgaatggatggagattagggagtgtgtgttattcatgcttcattcaccagtgcttagctgagtacctggcataaaatagttactgtggtggccaaagtaataacccccaccgccaccaattgctcatgtcctatgttacacagcacaattacataggaagggggaattaagagtgcagataaaattaatgctgctcatcagctgtccttaaaacaagattatcctggagtatctaggagagcccatgtaattacaagcattctttaaaactggaagagggaggcagaaggttaagaaccagagacggtgggcacaatggctcatgcctgtaataccaatactttgggaggccagggtaggaaaatcccttgagtgcaggagttcaaggtcagccatggcaacatactgaggtcccatctctacaacaaaataaaaacaaaattcactgagtgtcacgatgcttacctgtagtcccagctactgggaaggctgacatggtaggattgcttgagcctgggagtttgaggctataatgagccatgataggaccactgaactccatcctagtgacagggcaaggtcctgtttctgaagaaaaaaaggacattggaatcagggccctctccatcctgaggtgcctacaaggcatctctctctgcaaacgagtaaacatcaccctccaactccttacagagtggagcaacaggaaaactccctcacctcatttctgtgctgcttgggaggcctggacagcccaataaccagctcctcgctgatgaagcaatcaggaaatggctcgagttgagctaaggagaatttggatccttcctttggttctcagtaggcagggtaggggccaggcatggtggctcatacctgtaatccttgcactgtggggggccaaggtgagaggattgcttgaggccaggagctcaagaccagcctggacaacatagcaagacctgggtggcatacacctgtggtccctactacttggtaggatgaggtgggaggattgatcacttgatcccaggagtttcaggctgcagtgagccatgatcacaccactgcacttcagcctgggtgacagagccagaccatgtcacaaaaagttagaaaaaaaaaagagagagggagagagactatacacaggcaccaccacatttggctaatttttaaatattctgtagagacaaggtcttgctaggttgcccaggctagtctaaaactcctggcatcaggctgggcatggtggctcatgcttgtaatcgcagcactttgggaagctaaggcaggcaaatcacctgaagtctggagttcgagaccagcctggccaacacggtgaaactctgactctatcaaaaatacaaaaattagctgggcagtagtggcgtgtacctgtagtctcacctactcgggaggctgaggcaggagaatcacttgaacctgggaggtggaggttgcagtggaccccatcactgcactccaccctgggtgacagagcgagactgtcaaaaacaacaacaacaataacaaaaacaaaaacaacaacaacaaaaaaaactcctggcatcaagacatcttcctgtcttagcctcccaaagccctgggattatactgtttcctataattgaagacacttgttcttatactgctttaaggtataaaggaagaaaaaaaaaacagataatggcaaatgttggtgaaggccgggcatggtggcagcctgtaattccagaacttagggaggctgaggtgggcagatcacttgaggccaggagtatgagaccagcctgggcaacatggtaaaatcccaccactacagaaaaatctaaaaattagccaggcatggtggcgtacacctgtaattttcagctacccaggaggctgagatgagagaatcacttgtgcctgggaggtcacggctgcagtgaactgtgatggcatcattgcactgcggcctgagagacagagcaagcccctatctagaaaaaaaaatgtcagtgaagatgtggaggaattggaacccacatacattactggtgggaacataaaattgtgtaaccattttgtttgggtatttcttttcttgtcattttaattggatttttaaaaaatcaagacggggtttcactatcttgcccaggctggtcttgaattcacgggctcaagccatcctcctagctgagcctcctgagtagctgggattacaggtgtgagccattgcacccaactggtatagccacgttagaaaacagtctggcagtttctcaaaaggctaaatgtacagtcatcctataatgcaacaatttcactcctaggcatatatcccagaaaaataaaaatatatgtccacacaaaaacttgtacaacaatcttcatagcagcattattcataatgaccaatacatggaatacatggaaacaacccaaatatccaccaactgatgaacagataaacaaaatgcagtgtgtctctaccatggaatactgccatagaaggaatgaaatattgatacacactatgacataaaggaactttgaaaacactgtggtaagagggaaaaaaagccacaaaagatcacatattgtacaattctatttgtccagattaggcaaatctatagtgacaaaaaaattaatcaatggttgcctaaggctgggggcaaaggtaggtggggagagtaggaggtagtggctaaggggtatggatttctctatagagtaatgaaaggttctaaaagtgactgtggtgatcgatgcacagctctgtgaatattctaaaacctactgaattgcagatttcaataaataaagtgaatggtatgtgaatattttaataaagctattatttaaaataataataatagggggctgggcacaggtggtcatgcctgcctgtaatcccagcactttgggaggctgaggcaggaggatcacttgaggtcaggagttttgagcccagtcggagcaacacggcaagatcccgtctctatgataaaaaattacctggacatggtggcacatgtctgtagtcccagctacttgggagactgaagtgagagaaccacttgagcccaggagtttgaggctacagtgaaccatgatcatgtcactgtactgtagcctaagcaacagagcaagacgctgtctctgaaaaggaaagaaaacaaatgcaagtttttatcactttgtgagtgtagccaagttggaggagaaatagacaataataaaagagcactgaataatgacggtgagtggctggttaggctcagttgctagctaaatggcttctaaaaaattcaataaagttacagctctggggacagtcatgtagtcaaagaatgaaggcgaaattcattacaattgcccatggtctttatttacatgccttctagtgaaaaattcctaagtgcctaaacagcaagtctgcaatgatagcagctgtttattaaagactacaaaaaagaaatggaggccgggcgtggttgttcacatctgtactccttgaattttgggaggctgaggcaggcagattgcctgaggtcaggagctccagaggagcctggccaacatggtgaaatcccatctctactaaaaatacaaaaattagctgggtatggtggcgggcacctgtaatcccagctactcgggaggctgaggcaggagaattgcttgaacccagaaggtgaaggttgcagtgagccaaaatcgcaccattgcactccagcctgggtgacaagagaaagactcttatcttaaaaaaaaaaagaaaaaaaagaaatggcatcttcttcaagaattacatcgtgtttcatgataaagaagctctaattttgcatttgttcaagtattgatgagatttacccaatatgacacccatcttggataaaatgcaaacaacacaatttcattttctcattaacaaaaccgattaagtagtctaatataaattccgatcttattaaaaactgatcagattaaaaaaattatggaattatggagccaataagatgttacaacctgttccaaggggaattccaaaatccacacatatctgagaccatcaagtatgatgaaatatatttgattactatattgaaaaataaactgattacatagccaacaattggacaggggtctcctcatccacagccacacaaacccgatcatgcaactgtatggttacaaggcctacatagcctagaagggactggtctgacttgagatttcatttgtatttgtattttgagacagggtcccactctgtcacccaggatggagtgcagtggtataatcatagctcactgcaaccttgaccaactgggctcaagagatgctcctgcctcagctgcccccatacctgggaatacaggcaagtaccaccatgtcaggcatttttttcatttttgtagagagagaagacttgctatgttgcccaagctggcctcaaactcctagaatcaagagatctgcccatctcagccacatgagtaactggggccataggtacataccatcatgcctggctatatttattttattttattaaatttattttttttatttttgtagagaggaggtcttgctgtgttgcccaggctgctctcaaactcatggccttaaaacatactcccatctctgcctctcaaactgttggaactataggtgtgagccactgtacctggcctgacttgggatttcttttatctagcatcctttacttggtaggattgggaaaagcagtagtgttttttaaaattacttaataattcaatcagaatcaaactcaaccttgaccactgccttctctcacagctcacatccagtctgtcaggaaatcctactgactgacttcaacatgtatccaggctctaaccatctctcaccaccaccatgaaccccgtcaggatcactatcatctcccaccgggatgttgccacagcttggcccccatgcttccacccaaatcttcccatagtctttctcaactcggcagccaggtcgtgcttttaaatcaggagacggatcatgtcgcctctctgctcagaagcccttggtggttcccattttagtcagagtaaaagccaaagccccagcaatagcgtcccagggcttacacgatctgtaccgatcccagcccagcaactccctggcctcctcgctgacttcgctccctctatctctttgctccactggcctccttccagagcctcagacacaccagagagtttcctcctaatgcctttatcctgttgactcagcctacaatgctcttccctcagcaccttggccagctccatcacctgcttcaaacttttgctcaatattcacttatgaggccaaccctgaccactctacttaacactgccatctgtccccattcccaccatgctcatttatttctttctttttgaaacaaggtcttgctttattgcccaggctggagtacactggtgcaatcacagctcacagcaacttcaacctcccaggcttaaacaatcctcccgcctcagccaccctaggaactgagactacagctgcatgccacaacacatggctttttttttttttttttttttgagacggagtcttggtcgcccaggctgaagtgtaagggtgcgatcttggctcactgcaatgtctgccttttgggttcaagtgattctctgcctcccaagtagctgggattacaggcacccaccaccacacctggctaatgtttgtatttttagtagagatggggtttcaccatcttggctaggctggtcttgaacttctgacctcgtgatccaccctcctcggcctcccaaagtgctgggattacaggcgtgagccactgcgcctggcctttaaaaaaatttttttttagacatgaggtctcattatgttgcccaggctggtcttaagctcctgggcttaagcgatcctcccacctcagcctcctaaagttctgggattacaggcgtgagcaactgtaacatgaggtcccagcttcatgttcattttttgttgttgctacaacaaagtaccctacatttagtggcatcaaacaccacaaatctaccatcttacagttctgggggccagaagcccaactaggtctatcaaggctaaagtcaaggtgtcagagaggctgcattccttctgggggaggctctagacagaatgtgctcctttgccttttccagcttctagaagccacctccattccttgacttacctcgtgactccatattcaaggccagaagtgcagcatcttcaaatctccctctctgacctcttcttccattaccacatcactttctctaattctgactctcctacctcattctcttataaagatccttgtgattggtgggtatgggggctcccatctgtaatcccaacattttgggaggccaaagaggaaggattgcttgaggccaagagttagagatcagcctggggaaaataggaagatcctgcctttacaaaattaaaatcagctggacatggtgatgcatgcctgtagttccagctactggagaggctaaggtgggaggattgctttagcctaggaggtcaaggctgaagtgagctatgatcacatcactgcactccagcctcagtggcagagtgagactctgtctccgatataagaaaagaaatatacatttggtctctgcccctggttcctggcatagagcttccaaagctcttataaagcccttcgtgacagaggtaataggagcattttctgttttgatatttagtcttagtcccaggttcctgacacaagggcctctaaggtctttcagatctgcagcatggtaagaatgcatgtgggatgctgttgagctaacagggtggctgcaagctccgagactgcttcaggaggagggctagctgccagagaaagcaaccacattttttttttaaaacggagtttggctcttgtagcccaggctggagtgcaatggcacaatctcagctcactacaacctccacctcccgggttcaagcaattctcctgcctcggcctcccgagtagctgaaattatagggatgtgccacaacgcctagctaactgttgttatttttagtagaaacggggtttcaccatgttggtcaggctggtctcaaactcttgacctcaagtggtccatgtgcctcagccttccaaactgctaggattacaggagtgagccaccgcacctggccccaacaacattttttgaggcttggaactttcagcctcacctgctgaactccaggaggcaaaaggaactggagattgacttaactaccaatggccagtgattttatcaatcatgcctccataaacacccaaacagcagggtttggagagcttctgtgttgctaaacacaaggaggtcctgggagggtagtgtgcccaacagagggcatggaagctctgtgcccctccccacttaccttgtcctgtgcatctctttcattggctgttcctgagatggagccattacattgagccagtaatagaaaataaggtggccagatgcgctggctcatgcccgtaatcccagcactttgggaggcagaggtgggcggaatcacttgagcctaggaatttgagaccaacctgggcaacataagaagaccccatctatacaaaaaataaaagaaattagccaaatgtggtggtgggaaccctgtaattccagctacttgagaggctgaagcaggagaatcacttgagccctggacgttgaggcttcaatgagctatgattgcaccactgcacaccagcttggacaacagagcgaggccctgtctcttaaaaaaaaaagaaaaaaaacttgtttttctaagttctgtgagttgttctagtaaataattaaactcaacaagagggtcatgggaaaccctgatttctaactggttggtcaaaatacaggtgacaacctaggacttgcaactggcatctgaagtgagggtggtcttgtgggactgagcccctaacctgtgggttctgtgctaactctaggtagtgtcagaatggaattgtgggatacgcggttggtatccagagagttggagaactggtgtagaaactctgcacacacagttggtcagaagtctgtgagtagagagaaacgtgttgcaggaagtcagggaccccaaacagagggactggctgaagccacagcagaagaacataaattgtgaagatttcatggacatttattagttccccaaattaatacttctataatttcttaggcctgtcattactgcaatctctgaacataaattgtgaagatttcatggacacttatcacttccccaatcaatacccttgtgattttctatgcctgtctttaatctcttaatccggtcatcttcataagctgaggatgaatgtccccgcaggaccctgtgataattgcgttaactgcacaagttgtttaaacaatatgaaacctgggcaccttgaaaaaagaacaggataacagcaatttcagggaacaagggagataaccttaaactctggctgccagtgggccgggttgaacagagccatatttctcttctttcaaaagcaaataggagatgtattgctgaattctttttctcagcaaagaacatccctgagaaagagaatgcatccctaaggggaggcctctgaaatggccgctttggggacggctgtcttttacagtcatagataagggatgaaataagccctgggttcgcgtggcgctcccagccttatcaggacaaggaaattcccgcctaataaatgttggtcagatgggttgtctgctctcaaaccctttctcctgataagatgttatcaatgacaatgcgcgcccgaaacttcgttagcaattttaatttcgccccggtcctgtggtcctgtgatcttgccctgcctccatttgccttgtgatattttattaccttgtgaagcatgtgatctctgtgacccacaccctattcgtacactccctcaccttttgaaaatcactaataaaaacttgttggttttgcggcttggggggcatcacggaacctgccgacgtgtgatgtctcccctggacatccagctttaaaatttctctcttttgtactctttccctttatttctcagactggctgacactcagggaaaatagaaaagaacctacatgaaatatcaggggtgaatttcccccgatatcacactggctcttctctcacctgtctacctgcttaacttaataggagaggcaatgcatggtgctcatgaacaaggcaagcattaaagtcagaccagactaacatttgactcagtcctaatattcaggtgagcttgggcaaatcgctcattaaccccaagtcttcatcattttgtgcatataatggggataactgtggcacccacctgtttttgtgagaatcaatgaaatattatgcttgatgttattgtgatcatgatactatctgacaagggcagtgatgcatgataacatcaaaaaattagaaactgtaatgaggtctcttgggcaaaattccatacaagcaaattactgtctctacaaagcatttctgccacacttaattcaccattccctgaacaaaatgtgccatcttcattgttcaggtctgtatagtgctggtttccctgcctgggcagctcactccatcccatcccagcccaatccccatccctccacctcccccttccctccccactctcatacaactcttccttatcttacaggacttggcttcaatgtcaccttaactggaagcttctctccctctccagaagagcttccgattgcacttgatgcatgcactattatttgatcatttttgagttacagtccaagtctttttgtacttgaataacatgttgcccagtcagtttctcttcctggattcagaagtctttcatggtaggtccagctagaagtgacaaaaagacatttaaaaaaaaaaaaagagggatgacacagacatcagcacttaaaagttttaaacgatatgtgaaaaacaaaatttaagggcttctaggagaaatgtaggagggaaggtgttactgggaaatatgatagaaggttaatttttattttattttatttttagagaaagggtcttgctctatcacctaggctggactgcagtggtgcaatcacagttaactgcagcctcaacctccagggcttgagcaatattcccatctaatttttattttgtttaagaaatgcagtcttgctcttagcaaagctaaagtgcaatggtgtgatcatagcttactgcagcctcaaccttctagactcaagtgatcctccagtcttagcctccccagtagctcggactacaggtgtgcactgcaacgtgtagctcattttttttttttaatttttagtagagacaaagtgtcactatgttgaccaggttggtggtgatctcctacactcaggcagttctctcacctcagccttccaaaatgctgggattacaggtgtgagctgccacacctggctgagggggttaatttttaattatataaagagctcaaagcaaatattagaagaagcctaaatgcctccagcagttgactggtactggtaaattgtgatacatccatataataaaatattatgcaaccatgaaaaggattaagatagatcaataggtattggcacaaatgtccacgaaatatgaaaatatgaagtgatgttcaatcaccatgtacgtatcttgaaggatatggcccattttctcaactgcaattatttcctgagataagattatgggtctaaagagtgaaggacatttttcacttatttaaaagtatttatcatttttataatttaataaaagattaaacagatcattgaattagtaaaagacaaagtaactctataaataaatggaaaagacacagataccccaggcatggtggctcatgcttataataccagtactttgggagggggtggtggggggattgcttgaggctaggagttccagaccagcctaagaaacaaagcaagacctcctctctagtaaaaataaaaaaataaaaataattggccaggcatagtggcatgtgcctatagtcccaactactgaggtggaaggatcacctgagcctaggaggtcaaggctgcagtgagttgagactgtgccactacactgaagcctaggagacagagcgagacttcatctcaaaaaaaaaaaaaaaggacaataaagaaataaagctaataagctaacataagggaagataaaatatgtgacaaataggctgggcacatggctcacagctgtaatcaagcactttgggaggccaaggcgggtagatcacgagatcaggagttcgagaccagcctgatcaacatggtgaaaccacgtttctactaaaaatacaaaaattaatcaggcatggtggcatattcctgtaatcccagctactcaggaggctgaggcaggagaatcgcttgaacctgggaggcacaggttgcagtgagccgagatcacaccactgcactccagcctggtcgacagagcgagactgtgtctcaaaaaagaaaaaagaatgggtgacaaagtaataataggaggtctttcatttatcacacagaaaataacttgttaaattataatacctgtgtgggcgaaggtgcagtgaaatggccattttcttgtagtattagtggtgtttaaaatgtatataagccttccagcataaagcttggaaattttttttaaatcctacagacagtgactcattatactgcctcctccaactcctggcctcaagcaatcctcccacctcagcctcccaaagtgctggaattgcaggctgacagccaccatgcctgaaagctttgcaatttacattgagggtaataagaatgctcatgccctgtgactcacagtaatctcacttctggaaatttcacctttggatataattcaacctaaacaaaaggtcatatgcacaaacacagtgaaaatctgggagtaatttttttctcttttttttaaaaaatatggaatgcttcacaaatttgcatgtcattctttcacagaggccgtgccaatctctctattgttccaacttaagtatgtgtgctactgaggcaagcatgagtaatttaagatagggtggttaagtgaaataaggaagaattatggagaatttaaaaatctatgctatttataggcacctagtaacagctcagtaaatattagctgctactattattatttttatggtaatttcactcaattaaaaactgtcgttaaaaattaccattgtcatggaacataatgtctcctactgtataattgtagaaacagatacaatttgtcccttggtatatggggggattagttccagctctcccatttctgtgtataccaaaatccacgcatactcaagttttcgaagtcagtcctgtggaatccacatataacacaaatgggaaaattagtgaggtgtggtgacaagcacctgtagtcccagctacttgtgaggctgaggcaggaggattgcttgagcccaggaggttgaggctgcagtgagccataattgcaccactgcactccagtctgggcaacagagtgagacagaaggttgactttttaatagaatttttctgttcacttgaagatatggtcaggattgtggcatatgaaaattcttcataaaataactatctaatccaattaatgctggaattgggaacagcagaagtgtcatctcagagctactcgcaatgaaaggtgatgtctggggctcaggtgtgttgaggtccccatgcctggactatgggtgctgagtgggatttacttgtccatccattttctatattccagcactgggaaactagggacagtacttgttctcaagggaatcttcagcttaggtggctctgtaaaagagaaattacatcattgaaaaatcgtcgcaggtcaggtgaggtggctcatacctataatcccagcccactgggagactaaggcaggaggattccgtgaggccaggagttcaagaccagcctgagcaacacagtgaaacctcatctctacaaaaaattagaaaatgaactgggtgtggtaaaacattcgtatagtcccagctactctggaggctgaaataggaggatcgcttgagcccaggaagtggaagctgcagtgagctctgatctcaccactgcactctagccttggtgacagagtgagaccctgtctcaagacacacacaaacacacacacacacacacacacccaatctcactctgtccagccttgactaatcaaaagggccttctggttacagaagaggtatgctcttttgtaggacagggagagaccagcaagcttgttcacagacttttcctcatcctctgcttagttttccaagaaccctcacagtggaaatggagtctctgggaaaatgacctaaatctttgggttaccaggggagaaatatgcctcctttgtcaattaataaatggaacatctgccttaaaatccagggagttctgctagaatgaatcactccctaagaccctgaccaatgcatggaacatgaaaaactgaagtttaactgggcgcggtggatcacgcctgtaatcccagcactttgggaggctgaggcgggcggatcacctgaggtcaaaagttctagatcagcctggccaacatggtgaaaccccgtctctactaaaaatacaaaaattagttgggcatggtggtggacacctgtaatcccagctacttgggaggctgaggcaggaaaattgcttgaacccggaaggcggaggttgcagttacttctagaagaatttccattagccctttgaaatccttcaacattcatgaaggccaaagagttttcacctaatttaatctgatgggtatgtgaccagagtctttctagggaatagagactcccaaacagttcgactgggaagtgaggagagaatttattactcaaaaccaaagggaaatgaaaagaggccaacatagaatgtcattattctttcttggcggggaatggattccagagtcattctgtgacctttacatgacctccttattagcatctaaaagcttccagtgtaggatgcagccagctaggttctcttctaatgtaataaaatttgcttcggcaaatcttatgcagagccatctccaggctccagaaacaataggctataaattactggatctcccatttgatacaacgaagtatgagcatggtcctgaatgactcctctacatactactctgggtggcttgaagtgaatttgatacaagaactggagcgagggcaaagcagagctagatctaggattaatgtgcttgggcccagctcctcactactcacctatgagtctagttccagaacccaagtagaggatggggaaacaaggctcctgactttttttccctaatgtctgcatctctttcacatttcttatctccttgcaaagaaactaaacaggctcaactgaaataactaaatgattaaaccctatacagagaatctccaaagactgacaaaatatcattcaagactgttacacagacaaccttgaggatgacttgatgtaccagtgatctacaatatttgggatcattccaaattcccatcaaggatctgcctatatcaacaaaggagccaaggaccaaccattcaaatgggccctgctgccaagccttttttttttttttaacaatgccatctcttcatattgttccatttaacaaaactgcagcccttcatctatccttaagtcccttggccaatggtacagagccagagtatgctactccctagcaggaaatcaacaggatgacctactaaacaccattcagaagatgctaagacccatgaattgcaacaggaaagaaaagacagagaattagtcagacaggtacatgctgtgccaaaaatgcactacagcccccacccaattctgcctaatcctagctgggctgacaccaacctgatgagacaggcctataagatctcaaactaaaacagaaactcctgaactgggttctttcgagcccaggaagcagcagtaaatcattaaagaacagataagttcttaaggtgagggagagtttcagataaatggaatgctggtagaacacagggcccaaaggagcaaaagttaacctaagcccaggtagaaccttgtttactagagtattaggcatgggtttgggcaactattctaaccagagaaactggcttcagtgagggcaagttggcaatccaaggtatagcatgcatagggctggcaaaattcagggtgactgaagcaaaagcttcagaaccagaaagaccacatctgggggtagagcacaaaactctcaagagatgaatctttgtaagagtgaggcagaactatatagcagttttaggagatctgttggtgcccagcaagagctccaaacgggctatatgcagggatgcaggctgtagtctcaggagaggaggttcacaaaagtcattcagtccaagacctcaaactgtgttctctactaaaaggaatcaaggttccctagagaaacggctgactccatgcatggtgcagtatattgatcctggaacatctgttttgccagaaagcaaggaagccatcaaagtccaacaggatcacgtcaaaaagacatgaaagtcaacttgaagagataattattaacctagatgagacaatgtaagcatccaaaacagtaaagactgcaatggcctgaaatacatcaaatgcaaacaataatctatgagttcataatggtattcagaaaaaaaaactactggtcattagagggaaggttactaggtcactaacttactactctgaaaagtgacttaagatgagaggtagggtggagaattagctatttattcagtctttcctgtacaaacataaatttttagggagattgaagcagatgaaacaaatctggaaaaatggaggtaactgcttaatctgcgggttgggtgcatggaggttcaacatatttcttttgtgtatatttgaaccccctacaaaaaaagcacaagacagaatgtgagccaagcagcttagggtttaggcaaggcttctgcctacaagagacactaggatatgaggggtagttttagccctaatgggctgagccaactggaggtatatagggaagtgctaaattgcagaggtatcatgttgcccagcacttgatcaaatcctagatcctaggtctgcttggtagcatgcttcctaggtagtggatctgaggctacctatagaacttcctttgcagtcatagttcgctcagaaactacaaaagtgcttgctcttgaaaatggagtctttgtccatttcatgcttctataaaagaataccacagactgcataatttataaaaaggaaaaaaggaaggaaagaaaaaaggaagggaggagggaaggagggaaaaagggaaggagggaaggaaaggaaggaagggaaagaaggaaaggaaggaagggaaagagagaaagagggaaggaggaagggagggaaggagggagggagggagagagagagggagggaggggaagggaagaaaagggaagagaagggaaaggaggaagaaaaggaaaggaaaggaataaattttatttcttaacagttctggatgttaggaagtccaaggttgaggggcctgcatctggtaagggtcttcttgctgcatcatcccactacagaaggcagaaggaaaagagagtgcaagaaagcaagagggcaaaaggggctgaactctgttttataataagcccactctgtgattactaatctattaccacaataacaacattaactcattcatgaagcctattttattaggccccacatcccaactgttgcattgaggattgagtttccagcacataaactttgggggacacatttaaaccacagcagagcacttaggttaattcaactaagaggagctgggaaaatcaaaggcatgagaaagacagcaaaagctagcagagagaaatgcataggttaaggaaaaaagtcacagtgaatcctgtagtgcaggctactttatcaaaagcacctaaaaaagatctcattaactcccccagctcacctccatgcacatctaaagagccacacacagcaccaccaaaggcagcacaatgagaacagcattctcctcaacagacaagctgggagtatctagacacctgacctcaatagctccagaacagccctaaaacatttcctccctaaccaccactcaagtcaccagcttggaaagtattaagaaaacccaaatcctgacacaccactatgaaacaacttaaaacagcaaagaacaacccatttaaacagcaatgccagctgttgggaaaaaaaggaacaatgagtagaggagaaacagacctctcggggtccaccaagacccagtctctcagcttcagcacttttaaatgcagaatccatacccctctggggcctgtggagctccacaaggcatgtcgtcctcaaagataaatgagcaggcaagctggctagaaaaccactaagggtatttattctttaaagaatctttatagggtcaaagaagaatgggtcctaactggctatgtgaactccccacagattctgaggatgatgtcattatccctttccagatgtgtttaacactttgcagtcacttgtattcctgccactgagtgccagtgctttgctaatttgaactgattccagctcacgctgaccccagctccctggatgttaccattagccaagactgtcacccatactgtaccctttcaaagagtcctaaaaacagctcttcacctactcttccaagacaagtaaaaatgactgccaaagaaatggggaaaaaagattcagagagtgaaaacaattaatatactaacaagagagcaaaaagcaaagggggaggagaaactaggaaaatcatatatgggctctcacctatttccaaagctgggctaatgtccttctgcttgtgtctgaataaggcaccaattttaagctgctaatgaaaaaaaaagaaaaagagaaagaagcaggcccaggctgggcgcagtggctcatgcctgtaatcccagcactttgggaggccgaggcgggtggatcacccaaggtcaggagttctagaccagcctggtcaacatggtgaaacaccatctctactaaaaatacaaaaaattagccaggcatggtggcgcatgcctgtaaatccagctactaaggaggctgaggcaggagaattgcttgaacctggaaggcagagaatgtggtgacctgagatcacgtcattgccctcaagccacggcaatgagaacaaaattcagtaaaaacaaaacaaaacaaaacaaaaccaccataaaataactcagacttaattaaatacaaccctagtggtgaatgactaaagatggattactcataacagagataacagtccaataagaatccaggaatcttaccttttaataacaaaaaaatcctttccttctaaagtaacatcctctcaaggccaggaattccattagtagaaagccttcctaaaaaacaaaattcctggccaggcatgggttcacgtctgtaatctcagcattctgggaggccgaggcgggaagatcacttgatatcaggagtcgaggcgggaagatcacttgacgtcaggagttcgagactggcccggccaacatggtgaaaccgcatctccactaaaaatacaaaaattagcctggtgtggtggtgggcacctgtaatcccagtgacttgggaggctaaggcaggagaatttcttgaacccaggaggcagaggttgcagtgaccagcaaggttgcgccattgcaccccagcctgggcgataagagtgaaaactccatctcaaaaaaaaaaaaaaaaaaaaaattcctttgggaaggccttctacataaaaatcttcaacatgagactggaaaaaagggtatgggatcatcaccggacctttggcttttacagctcgagctataagaacaaaaagaaaaagggatatcatttaaacacggtatgtagaaaagaataattattgaatctgtactggtctttaacttttacactttgatctttaattctgttattgtgattgagtccaaagaaaaacagtatgagtaaaataaaaagaacaccaaaaatgctaatattctgtttaccgaagtctgtagtgaaatatcccattaaatccaagtgcagtgacacacccataatcccaagcactttgggaggctgaggcgggtgaatctcctgaagtcaggagttcaaggccagcctggccaacatggtgaaaccccaactctactacaaatacaaaaattaggcaggcgtggtggcagaggcctgtaatcccagctacttaggaggctgaggcagggagaattgcttgaacccaggaggtgagcttgccatgagctgagatcataccactgcactccagcgtgggtgacagaacaaaacttcaacctccaaaaaaaaaaaaaaaaaaacagctagcaggtgacatttgctatagggagtagggagactagggatatgatcttgctgcaatctttccattttagtaaatctaaacaagtgtgaatccattctgtttcgtccccactccactccagagccaaaacaagaaaatcaattatatttctagttctttaaaaacatatctaactaaatcatctaattaaaagataatatgcatggttccatactctaaaagaaaacttatgtcctgcatatcatggacatttgatgaatgcttattcagttgactggtgtagacttcaataataacctgttcaatgcattatgccagatgaatcttgcatctcaaaagtagaacaaatattgttctttcagttttgtctacccataaatgcaatatttactaataaaaagaaaatgagtttattgttctagagagtatgagaattttgacaacatgaattctcctgtcctaggacataattaatacttagaggcatactatttcatgtggaagctaccattaaatcaatgttaagtgttaattacctcacataatcttctaatctgacttgactgaagacgtacctgacaaagttgatttatcaagttgtaaatcttcacctgttgaattcataagttcatgtctgaaaggtgagaataaatacttaatattcattaggcaatattcagcaaagtaatatccactagtacatatttaatatttcatcatgaactgcgggtgtgaagagaaaagacaggctgggcacagtggctcacacctgtaatcccagcagtttgggaggccgaggcaggcagatcatgaggtcaggagttcgagaccagcctggccaacatggtaaaaccccgtctgtactaaaagtacaataattagctgggcatggtggcaggcacctgtaatcccagctactcgggaggctgaggcaggagaattgcctgaacccaggaggtggaggttgcagaaaccattatcatgccactgcattccagcctgggcaagagagcaagattctgtctccatcaatcaatcaataaaaatataaggaggaagcatttactgtgtatttatatgtctggtattatgtgaagcactttactatcttatcaaatcttcgggacagatcttcagttctcatgaccacaaaagaggatactaaagctcagacaggagaagagacgtggccagcctgtgtccccagggcctatggtcttaccactaggttacagtgtttccagatatcacatgttgtgagatttttgctttaaaatgaaccaaaaaaaaaccaaaggtgaaaaaggcataagctattaaaaagtgggagaaacactaagagaaccttaagcatgtaactaaaaatattacggaaatgttattgaattcattagcaaatttagtgctaggttttcattgaggagtaggttatattactcatgatgaagaaaaatgttcattttaagtatattaacataaataccatcaatattgtttatcatgtttaaatgttcacttaaagcaattcagttaaaattctgcatatcatacaattttgtagtttgctagtaggttacaagtaaatagtcacccaaataaaaacatcatgttttccactggttgttgctcttttttaggtgagtatttgatgtatatcaacagagagaggataataacaaatcgctaatttctttcatcactatataaaggtggcttcaggatagaatagtatcagcgcaatgatgaatttgaaatctaacatcaattcagtgatgcatcaagataaaagtagagacaacaggggcaccttggtgagtactgaacattttatttatttatttattttgagatggagttttgctctttttgcccaggctacagtgcaatggtgccaacctcgcctcactgcaacctctgcctcctgggttcaagcgattctcctgccttggcctcccgaatagctgggattacagacatgtgccaccatacccgtctaattttgtatttttagtagagacggggtttctccatgttggtcaggctggtctcgaactcccgacctagatatctgcctgccttggcctcccaaagtgctgggattacaggtgtgagccaccgtgcccagatgaattccaaatttaacaaagcagactaagagaaacaattcatttaaaaaaataatatttggccaggcatggtggctcacacctataatcccagcactttgggaggctgaggtgagtggatcaggaggtcagcagttcaagaccagcctagccaagatcatgaaaccccgtctctactaaaaatacaaaaatcagccaggcgtggtggctggtgcctgtaatcctagctgctcgggaggctgaggcagagaactgcttgaacccgggaggcggaggttgcagtgagccgagatcgtgccactgcactccagcctgggcgacagagtgaggctccgtctcaaaaaaaataaataaataattcaatgaaattcctaagatccagggctttgcaataaatatgtaaataaatatccaatctccatactgaaagtttaaaagaaatgctaactaataactaaagaaatacaacttttcctcagctttgcagcaatctagaaacaaagtgtgtagacactacaaagcaccttacaaggagaaacatgtaaggatggcatgactcgccggcagccctgggcttgtccacggtacccccatgatgaacagtaactccactgtgtaaacgcccatgaacataagattacaagacttttccagtttagacataccatattttctttcagacaattcttcagtttgtttacgtagatcagcgatacgatgattccatttctctgaaaaccaagcaaaagttgcttctcaataacacgtccctatgtcagagcagcactaacgtataatgactgatttcatatattttacattctaacagtccatatcattttactgctttcaagaaaaaatttccccttcttggtggttcttagaattggtttaatgggagactattagagaagctgaaaagcaggagggcagaaaagttcaatcaaattaaacacaataacagggaggtcacaatgaggcggtctccaggggtcttttagcaaacttcctaaaacatgtctcagctgtgtgaaataagactttacagcagccgggtgcagtggtgcaggcctgtaatcccagcactttggcagcacaggcaggcggatcactttgagctcagggcaacatagccaaaacccccctccctagccccacccccaccccgtccctaccaaaaatacaaaacagcagggcatggtggcgggcgcctgtagtcccagctactcaggaggctgaggcaggagaatcacctgaacccaggaggcagacattgcagtgagccaagatcacgccactgccagcctggatgacagagcaagactccacctcaaaaaaaacaaaaacaaaaacacaaggttaagagggacccccgaccttacagatacaagtttaagagggacccctaagcaaaaaatgccaaccccttttctcccaatcattgaaacaccaggagggtgtaacagttttgcagcctagctgtagcaggctgatgcccccaagatgcccatatcctaatcccgggaactggtgaacatgaccttatatggcaaaaggagctttgcagatataatgaagttaagggtctttggcttttggggttgatgtactcactcggatccttgtaagagcagagcaggtgatggagagggtgggaggtgtagtgacagaagcaggaaactccagtcattcgagacgggcagcacaagctgcagagtgcaggccacctctacggccaggaaacggattctcccgcagagcctcggaagctaccgaccctgctcccaccttgactcagtaggacttactgtagaattctggccttcagacctgtaagggaatacattttggttgttttaagtcactacgtgtgtggtaatttgttgcagcagccacaggaaactagtattgtagtgaagcctcaaaacccccctgaaggggctgggctcagtggctcatgcctgtaatcccagcactttgggaggccgagatgggtggatcacttgaggtcaggagttcgagaccagcccagccaacatggtgaaatgccatctatacaaaaaatacaaaaactagccgggcatggtggcacatgcctgtaatctcagctactcaggaggctgagacaggagaattatttgaacccaggggggcagaggttgcagtgaactgagattccaccactgcactccagcctgggtgacagagcgacgctccatctcgaaaacaaaacaaaacaaaaaaaccccacctgaaggtttccagttctgccagcactctcccacccaacccccagaaacagacattccattgctgtgggccatggacaggcagaaggaagcacctcctcatggcagaggcctacccaggagaaacccaagggaaggcactactgggctggcccctctctgccaaggccatattcttttttttttgaggccagtttcactctgtctcccagactggagtgcaggggcacaatctcggctcacttcgacctctgcctccccagttcaagtgattctcctgcctcagtctcctgagtagctgggatgacaggagtgtagcatgcctagctaatttttgtatttctagtagagatgcggttttgccatgttgcccaggctggactcgaactcgcctcaagtagtccacctgtctcagccccgcaaagtgctggtattacaggagtgagccactgcacccagcatttgccaagacctttgatggcaggctttttccaggtgatcagtccttgtctggtctggctctgccccactctccttctcacctagttggaatccctagctacttttcagtagaggagagtgtgtaccccaatcccagcttggttcagatctgcatttaactcatggaacctggctgctccccaggttctgaagaaaaaaacggtctctctgtgtgtatgataaaggatgggcctgtccccaggaccctgtgagagggaagcccaatgtcccaccaggttggcagggctggggaagggaaagtgttatggcagccccaagaaaaaaaagaggcagcagagggagcaggacagcgctcacatggaactcatgccactgcctgaggggagggaggagtgcacgccagtgacgtcagggggcagagaggcacagttccagggcggctttccccctcacttcctgccatgttactctgatcgcctccaggtgagcctgcccactttgtgcccaggggcctgtagaaaaccacagctccccatggttatggccccaggagtggggcagagcagggaggagtcctggacagaggagaggcaggggtaggagggagtgggcctcaaactccaggagggggcccttctcatgggtcctgctttctggcttctccttccttacccctgggctgatcacttggggaagaactgggacaaagtttctcaccctcaggcccaaagggtttaattactgggcccttatggaggtgtgagccccctgaaaggatgcaaggttttgttttgttttgttttttgagacagagtttcactcctgtcgcccaggctggagtgcagtggcgtgatctcaccacactacaacctgcgcctcccaggttcaagtgattctcctgcctcagcctctggagtagctgggattacaggtggctgccaccacgcctggctaattttttgtatttttagtagagacagggtttcgccatgttgggcaggctggtcttgaactcctgacctcaggtgatccgactggctccgcctcccaaagttctgggatcacatcagccactgtgcttggccacaatgaaaggttttgtgtggagagcatgtacatgcctttctgggaaaacagtccacagctcttattctcagcaggcttcacggtgaaaaaaggttagaactcttgctacagagctgtggaagcagccaggtgaggggcctgccaagggcactctgggcactacctgggcactctcgagcccatcatcccctaggcaggctgcactgcttggtatttgcagagctgagggggtggggcatgtggggactgtgaaatcgccctgagatgacccacagtcctcagctaggaagtgagcgctgcatctcctgcagcgtcctccatccctagagccatggggccaggagaaccggcccttgcagcaagtgaaaagcctattattgattccctccctagccatgtagacagtgaaccaagacactcatatcaggtaaatgccttgttctctgttaccaaggtaaccagtaggcattcccagatacagcgaaggtcctcacaccaagatatgcacctggccacctgaggaaagagaaaggactatctgaggggatggggctgagctgggtgtggagtggtccttgtgggtcttggagagtgggagggggagcagcatgagccaggcctcaaggcagaaggacaaccaggagacagcctggaaaaagtgctggacccacaagggctcaaggctggccagaggggaggtgggataggctgtaaagtcctgaggtctgaagattggccctggcaggaagaaaccaggtaaggtggggtgttacctacaccctcggggccagatgcaggccagagcccgccaattaccaggcccttagggaggtgtgagccccttgaaatgatgcaaggttttttgtttttgttttggagacggagtttcgctcttgtcacacaggctggcacctttgcccagagcaggcaccaagacttctggctctgggtgtgacctcagtctgggtaaaagccccagcccccaccagcaccacctaccccctagactacttcaggtgctgagcccaagccaggggcaggaagctaaactgatgcctagggtaatcccaacaaagtccctggttccccgcagctatggggctgacggggaattacagcccaaaccccagatgctggctctcaaactaacactgagccctcagtgcccacagggagatacaatcagcgcactttccagatggggaaatgggatcagagaagtgcaacagccttgcccaatgccccagaccagggctccaggcccagagtgttcttttgtcactgtgttcagagggcagcagctgctgtgatgtacccacctgagcctggcagctttctccaactttggaagcccaggagcatggcccctgtccacagatgcacctggcatgaggcgtgcccagagggacagaggcagatgagtttcgtctcctccactggattgtgagggcctagaaggagacaagggtctgcttgagaaggcagtgaacagcgagcagcctgaggcagtgcccctctggatggatgcgcagtgcctggatggaacctggctcagacagagctcagttctgcaggtccctgaggcatggagagttcacagctaccaagtgtaggagtctggattcaaagccaacggcgtgactccaaagtccctgccctagcccctggaccacccttgcaggcccatcagatgcccaggccagcagcacagccggccaagaccagggaaacttggggagcctcagagcacccccaggtattccaacctaaccctggtgccccgcctctcaccacccttcttcctgctttaacctcaacccctacacaaagcctgggccacttcatgtggcatcaaacagacgcctcaataaatcagtctaatctcgaaaaaaaaaagacttaacagatatacaattgcacgttagaatgctaaagaccataaacatagaacaacttaaagtacatataaattcaatatatatccaatcattgtaactatgacacagtagaatattaaaatactattttcaaaatgtatacaagcttaatgttctatgtattcaaactatttattcaaaatacaaatcatcaacatacattgccactaatattcagtcccttcacaggacatgattcactgggagttaataaattagcagccagcaggcagtgacacaccgcaaaaatgaaaaccaagaggtgaaatagttctgaaataaaggttttaaagctaacagaaatcactgaattactaagtcattagcactaattttgagccaactaactaattaatatgagatgatacaatgtcctatactttggtaaatacagactatgtttaaacaatgtctgtaacgtgacttgtaaaatgctcctggctttacaaagatgtgattaagatgtagtaacacatgctaaaccatttccccctgcagagcatgtggtaactttcatcagtcacactgagagtccagaagataaaggaaaaggtcatggatttcgctgagaacttaccagagttgaactccctcattttccgttccccagcattggcgggttctgggactggtggctgtggtggctcgttggtctttgtctcttagaaggtggggaataatcatcatcttgaaaaagaaaaaatggtcattactgaaggaaccatcttaggttacagccacctctgggtcaattcccaacattcaaaagctgagcagggctttaaagctatcttattaataattatttctgtattgcgaacttcagcatatttttttctagttacatttgaaatgtttttcttttgggatgtgctcaagtgagtactgctttttcctctgccttgcttcattactttttagtttccttcatttgaatcatcattgtaagtctccccttctcctcaaataactttcaaattgctgccaagaactacgttctatcttaaggcttttgagaaaaaactttcaatgaagatagccgcctaaagttatacaaatatagaagaaacgggataaaataaagcttagattggaaaaaatatttaagattctacaaaattcacgcgtaaacaagggaagctgagtaattgtatgttcaaatacttttaacaagtgcaaaacatgtaggcttaaagaaatagagctggccaggcatggtggttcacgcctgtaattccaacagtttgggaggccgaggcaggcagataacttgaggtcaggaattcgagaccagcctggccaacagagtgaaaccctctctctactaaaaatacaaaaattaggccaggagtgatggctcatgcctgtgatcccagcactttgagaggccgaggcgggtagatcacctgaggtcaggagtttgagaccagcctaaccaacatagggaaaccccgtctctactaaaactacaacattagccgggtgtggtggcacatgcctgtaatcccagctactcgggaggctgaggcaggagaatcccttgaacccaaaaggcaaagattgtggtgagccgagattgtgccattgcactccagcctgggcaaaaacagcgaaactccgtctcaaaaaaaaaaaaaaagaaaaaattagccaggcatggtgaagttgcggtgagctgagactgcaccattgcactccagcctgggtagcagagcaagaccctgtctcaaaaaaaaaaaaaaaaaaaaaaaaaaagagagagagagaaagaaagaaagagggctacattatttatgaaacagatactgttaactcagtcaccagaaagcctgtgtataaatgagcagtgagatattcaagcacagcacacacacacttctcaggacagctgtcgtgagtgttccatgctcgtttccttctggatacatcagcaactcactctgctatgatcctgcaatacgtctcatgttagaattagagacatctgggccaggcacagtggctgacgcctgtaatcctaacactttgggaagccgaggcaggcagatcacctaaggtcaggagttcgagaccagcctggccaacatggtgaaatgctgtctctaccaaaaatacaaaaaattagctgggcatggtggcgcgcgcctgtaatcccagctactcgggagcctgaggcaggagaatcgcttgaacccgggaggtggaggttgcagtgagccgagatcgtgccactgcactccagcatgggggacggagcaaggctctgtcaaaaaaaaaaaaaacagaaaaagaaaaagaaaaaagaattagagacatctggatcaaatcagctgccagtctcgcaaagtgtcgggtaacatcctattaagcttgctgcttacacatcatctataaaatactgaaaatatcattttaagaaatcttttttttattttgagacagagttttgctcgttgcccaggctggagtgcaatggtgcgatctcagctcactgcaatctctgccccctgggttcaagcaattctccttcctcagcctcctgagtagctgggattacaggcatgcaccaccacgcctggctaattctgtattttcagttgagacagggtttctccatattggtcaggctggtctcgaactcctgacctcaggtgatccactgaccttggcctcccaaagtgctgggattacaggtgtgagccaccatgcctagccaagaaacccttattttaaaacaagccaggcgcggtggctcatgcctataatcccagcactttgggaagccaaggcaggtggatcacttgacgtcagtagtttgagaccagcccgagcaacatgttgtaaccccatctctactaaaaatatattttaaaaattagctgggcatggtggtgggcacctgtaatcccagcttctcaggaggctgaggcaggagaaccacttgaacctgggaggtggaggttgcagtgagcagagatcacgccactgcactctagcctgggtgacaatagaaagactccatctcaaaaacaaaacaaaacaaaacaaaacaaaaaaccactaaaaaaaagactccatttcaaaaacaaaactaaaaccaaaaacacaacacaaatgtagtacacaaatgaaaataattactgtgttaaacacagtttcatagaaaataaaagaccaatcaaatacaataagctgcctttttagatgggtatgttattcttctttcacagctaaagaaacaggctcagagaatgttatttgattggaccgtgttgcatttctggacagtgcagctgagatcagactttgtgtgtaactccactagcctaccagggtgcctctcataaaggtaagaaatgtaaatttggcctaatatacaaagttgccagggcagcactgggtcaattctacatacagtacttctatgttcatcaagggaaaccttaagggaaagtgaaaatgcttctagaaggcgactggacaccagcgcctttgcttgttgcctttgggctcttcttctaaggccaacagtgacctgaaattattgactggcttttccaatcaggtggacaaaatggtaccaaggttgccaacatcgatgtagaacatcgatgttctacaacattgcttaacgcaaggggagacactcctgactcagagtgtttaattgctcacctacttctttttctgccctcttgggcttctgaaatgaaaagaaccctggggtgatacagtgagtcaaaggggtgccagccgcatcacagcaaaatagattcctaaaaaatccctggcctaagatgacagccttggctggatcagtttgaatgtgctgatagtggacatggtagaatgaaggtggttgaaatgttcatattaaagaacttccacccagattgcaagaaaagagagaagaatggagacggcagcacaagcccctacaataaaagcagatgttttgagatcagttatatttcttctgacaaaaattaaagacagaaaccaaagtttagcctgagactacaattaattgggcaataagccagaggcacatatggcataagacagatttaaacatttctccctgatattaatacaaacactaaaattacaaatacatggattccaaataaaacaaatatttaaaaaatttaatgaataaacactggggtctacagtagtatttgaaggagatctcacaaacaggtttggtttttgaaggttagaactggtggtctagagaattcatttcattccagagaaagaaagagaggaatttcttgggttccttcaggaatgcgtctagctttgcctcatctttgtttgaactatggatacagcagaagaaaacataaggatttcacagatttaaggtgcaaaaagtcactgggttctctaagaagtctgggattcttctgctggaaaaataagtttgttgagaaaaaatgagttggaggaggctgttattgaagtgaagcagaactgtttttactaatctgcttattacccactctgtagtgtggaaacaaattattcatgcacaaggtcctcttactgttcctagaatgcagtggaaagagaacagattagttttcctccctcagaacacaacccctagaaacatcctacctcagatgagatattgcctaattattttcaaaagacagtgaaacatcatggatgtaaatgtttgctacaaaataaatacatgctagaaacagaagcatctgggtcacagctatattagagctacctgtgttcccctgtcactgacattaaaacaaaaatgtccaatacaatcattcacagcgtgggagaggggaagttgaaggatggaaaggccaggcataaaaggatttcagaatttccgtccataaggaagtggctttgtgcactgtctgttactgcgtgcaaggtgaaatttgaagaatgaaaacgtgcagtaacaagggctcctttgtccaactcacctctccagataccaagtttcagacatgttgcatttgaattgaaaggttgatataattttttttaaagaacacttgcggtgtttgaagtgacaaaggctgctgtgacaaaaaagcagggaaagggaattttttttttaaaagcaaacaacaacaacaaaaaccccacagaaaagcaaacaacaaacaaacaaaaaacagaggaagaagttgaacaccccgggctgtgactacttccaggaaggggctacaagaggcagttggaaattctatttgttttgcaactgtgggttttccggcctgcttcctttctaaagtatattactctgcttttggttcatgaagttatccatttctgttttctggaacagctatgtattttctttatctatcatctatctatctatttaccatctatcttttctaccttttgctatcaagagcttgtgtcaagcaggatagaattccagtgtatgttcactctaccgtttaaaacaagagctcttgtgggcattctccatcacatcataaacctgagctttctaaaacagagtgtggcaaactaccatgcatggaccatgtctgacacagtctgcgtttgtaagtaaagttgtaatgggacacaaccaatacatgtgttacataatgtctctggctactttcatggtataatggaagagctgagtcattgagagagagaccatatggcttggaaaacttaaaatatttaacatttagccccttgcagaaaatacttgctgactcttgttttaaaagatctctgtttagaatgctacctattgcgttctggatagaatcacaactctttaccacaattgacacagcttcagccctgcttctatatccagcctcatctatttctgctcctcctccttattttccttctggccatgctgatggattgtcagcttcccagatgtgcaagaatctctcctcccttcccaacattctcatgctctccctctgcctctcaagaacttcctgccccatctctcatgacaaatcctttctacattctttaagatgcagcccctttgctccttccttaaggatgtctgtctggctctattttgggtgacgtgctccttctgcatctcccagagccagcctgtgtgtgtcagctacaacatttctttgcatctctgtgtcatatatcaccaaatctgcctaagcttgcatgagtcactgcatgacaacttcagactccaccagcattgtccccactaaccacaaggcttagacattcgtccagtatgctcagggttgtggggtggtagcagtaaccagctggtgaccatcatttcttacatcagaatcaaatctgtagatctctgccattcgtaagtatttggagtttaaaattagcataaagattttccttaaaataagaacaaatagcttgagtaggcttttggaacgtaggatgtttccactggttcatttctgtgttcaatattcccacatgaatctaaacacgactctgctcttagtagctatgtgaccctgggaaagtcactcaatctcccgcagctaaattttgttgtgtgagtaatgaggagagagttgtgatttgtatttagagaataataacaaacaaaaggcatttagctttctggaacctggtatgtagtagaacctcatgaaatactagctctgttgataaaactagactgaaagaagctttcaaagtcaacaaaagtttgaggcagtgaaggacgtagaggagaagctgctgctgcagcctgtagctcctggaagcccgtttagtccatgatttagcaggaatgcattacccttccatgaggaggcactgcccacagaaaccaaggccattctttgaagacaaacatgtcttaatagcctttacattatgtaatagtgtaatacaaataataatttattattagtaataatgtgaaattatttacagtaccctaaccctaacccctaatcctaaccctaacccctaaccctaatcctaacccaaaccctaaccctaaccctaaccctaacccaaccctaaccctagctcctaatcctaaccctaaccctaaccctaaccctaacccaaccctaaccctagctcctaaccctaaccctaaccctaaccctaaaaccctaaccctaaccctaaccctaaccctaaccctaaccctaaccctaaccctaaaaccctaaccctaaaaccctaacctgaaccctaacccgaaccataaacctgaaccctaaacccgaacccgaacccgaaccctaaccataacccaaacccgaaccctaacccctaacccctaaccctaaccctaccctaacccaaccctaacccaaccctaactctagccctagccctagccctagccctaagccctaagccctaagcctaaccccaaccccaaccccaaccccaaccctaaccctaacccttcctcagcctctcaacctgcttgggttacaggtatgagcccgggtgcctggccaaacattccattttatatgtatatgctaggaatgaataatctctaaaccaaattatgaaaattctaccttaaacaataccaatagcaatattatacttaggaataaatggaatgaaacgacaagacttagatgagggaaattataagacattacttaaggaaattaaacttccaataaatgtaaaaatgtatcttatttgtggatttgtagaccacattgttaagtttcccaaagtacacaaagcaatccgtggattcgatgttattcctacaaaaatcccaaaggccttgggacagaagtggataagctgatcctgatcacatcccaatttcaaattttattacaaaggaacagtaataaaaacagtgggatccttgcacaggaataaacagaaagatcaactgaattgaattgggagtccagacagaaaacaatacctctatgctcaactgattttagacaaggtccattaccagtaaattggggaaagaatcctgtcctcaacaagtgatgtaaggcaacttgctatccacataaagggaaatgaaattgtatccttacctcataccacataaaaaattaacttacaatggatcgaagaccaaaacaggtgaaaactaaaaactctggaagaaaacatacagttaagcattcatgaccttacatgtagcaatagtttcttacatctgacaccaaaagcacagaccacaaaaggaaaaataaatcaatttatttcctcaaaatttacaacttttacgtctcagaagacatgaagaaaaaagttgaaagacaaaatgttataataggaaaaacaactgtcttatagtatactctcaacactcaacacagaacacttctgttaccagatacatgggttttttccccacacagaccaaatcttgggtaccagctgggtgtcctacagtgcaatccaattgtgacagtaaatggagaaagcatcagaccccataggctaagggctcagtcctaggaatacacatcatgccccttgttgcttgcaaatttaaatgacaaacacaaggatggtaaaaagaaagtgactttatgccagagcttagctgaagggaacgtacaggctcttgccttaagggaagcgcttccactttctgggcagaaagcggggccttcggacttgccagaatggcatgcaggggatgaggtgaggaggtgcggggtctatgggacatgctctgatgttttctccattaggtggtcttgctagcaccatcacgggcagagccaggttgtaaattgactgttgtctgctgccaatctcctggtgggggagagatatggaagtgccagtttgtttcaaggtttggtccctggaacttacaagtaatcacacagttggaaaagtttgcagtataggaagtgtctggtggagagacagtaaagcttataattgcattcctaaagagctaaatgcaggaacagcaaaatggtaaaactaattcatttcttctttaagaaaatatgggtactcagttacaagactgtaaccacttaagatgccaaccagaaacagtaggttcccaggttaccttctgtctgactttgctacagattggaggctcccacaacacccttattgggttcagcaatttgctacatcacattacacaacccatgaaagcagtgtacttactattcctgactcattaccaaggatcttttaaacactacaaatgaaaagccagatgaagagaggcacaaggtgaggtacatggaaggaatgcaggcctcccatgccctcgccagatatgatcctcccagtatctcctgtgttgggagagcaacacagatgctctcccaaccctgtcctttattacacaggcagattggttacgtctgtggccataggtgatcaactcaaccatcagcacctctccccttcacagagacgggacgggggaagaaatttcaaattctctcatgacaaggttgcttcccttggcagccagccccactgagggtgtccaggtgcccccagccatcaatcatttcattagcatacgaaacacacattacttcgtacattcccaaggcttagcgctctgtttcaggacactgcagcagagaccacacattaactcttattacgttccaacaacctataaaatggaagaaaatgtctgcacattagatacttcatcagtgtctgttatccagaatgtataaagaacttttacaactccatagcaaagacaacccaatctaaaaattgacaaaagactttaatacacacttcaccaacaagcacatgaaaagatgcttaacatcattaccataattaaaaccataaagagataacccttaactcacacaagaatagttatactaaaaaataacaagtgttgacaaagatgtgcagaaacttgaactcttaaacactgcttgtgacaatatgaaatggtgcagcctacgtgtaaaataatttgatgtttcctcatgaagttacaaatagatttaccatatgagtcaatgattccattcctaggtatataccccaaagacctgaaaacaactgttcaaacaaaaacctgtatgctctttaaatgtgtcaaggtcataaatatgcaggaaagtctggggaacagttccaggaaaagaaaactggatcctaatgaaaaaaaaaaaaacacattatactcccaagtgtggcatgaggtaaaagtgaagtgagtttgtggaccgaattatcatgtaggaacaatgctgatttcctgatctaggggttatgtggtagttacctgggagagtgtccatgttttcagtacaatataccggagtattttgtgggacactgcaaatctggtacagcaataactgttggggaatctaagggaagaaacaagttgtactttgtactactactggaagttgcctagaaatatgacattattggaaaataagttactttttaaaacaaccatgtcaataccatgccaggaaagcagacacatcatcaaaatccattgcagaggctatagttcagccaaagctgtaaaacccttaaaaaagtctcaatgtcaacagagtccacgtagtagatattattatatttattagtattagaggccattgtgtcaatatattagtgttagggcatggtatgggtgtctagattagtgttagggaatggtgtggatattgtattggtgttagggaatggtgcagatattacattagtcttagggcatggtgtggatattattacattagtattggaagcgatggtgtggactagatcagtgatagggcatggtgtggatattattacattagtattggaagcgatggtgtggactagatcagtgatagggcatggtgtggatattattacattagtattgaaagcgatggtgtggattagatcagtgttagggcatggtgtggatattattacattagtattggaagcgatggtgtggactagatcagtgatagggcatggtgtggatattattacattagtattgaaagcgatggtgtggattagatcagtgttagggcatggtgtggatattattacattagtattggaagcgatggtgtggactagatcagtgatagggcatggtgtggatattattacattagtattggaagcgatggtgtggactagatcagtgatagggcatggtgtggatattattacattagtattggaagcgatggtgtggattacatcagtgttagggcatggtgtggatattattacattagtattggaagcgatggtgtggattagatcagtgatagggcatggtgtggatattattacattagtattggaagcgatggtgtggattagatcagtgatagggcatggtgtggatattattacattagtattggaagcgatggtgtggattagatcagtgatagggcatggtgtggatattattacattagtattggaagcgatggtgtggactagatcagtgatagggcatggtgtggatattattacattagtattggaagcgatggtgtggattagatcagtgatagggcatggtgtggatattattacattagtattggaagcgatggtgtggactacatcagtgatagggcatggtgtggatattattacattagtattggaagcgatggtgtggattacatcagtgatagggcatggtgtggatattattacattagtattggaagcgatggtgtggactagatcagtgatagggcatggtgtggatattattacattagtattggaagcgatggtgtggattagatcagtgatagggcatggtgtggatattattacattagtattggaagcgatggtgtggactagatcagtgatagggcatggtgtggatattattacattagtattggaagcgatggtgtggactagatcagtgatagggcatggtgtggatattattacattagtattggaagcgatgttgtggattacatcagtgttagcgcatggtgtgaatattatataggtgttaggacacgatgtggatatcatagtaatgtagggcacagtgtgattattatattagaggccactgtaagaatatatattaacagccactgtgtcttggacgttgacaatgatattagggtgtagtccaaacagtgagatttgggggttttatttttctagatgaatttcttcctctgctgagtgctctaaagactcactccttggcactcagggccgtggacaggagctttttactcaccaatgaagaacaccaagttaacgcgacccccgtgctgccctgaggaagtcgaagctcctcgctgcttctggcacctcagcgggaagttggttgcggcgggatcgcgcgccctctggtggcgccatggttcagcacagacgctcttgctcacagtttctcggcggatgtgcgccccctcctggctgtcctgaaatacctataaaattcaatattcagtttattcagtgtcataattttggaaattcaaaccgaaataaaggccactatatccatatccttcccataaatggtgatggaagaattatttggaagccatatagaatgaaatgactctatacacaaattaaaacacaaaaacctactcaaaatagtccagagactacaacttcaaatgcaaaactataaataatctaaaagaaaacctaagagacattcgatctggtgttgagttttaacacacagcatcaagtgccaattcgtgaaaatactgagaacagactttataaaactaaattttctactatgaaaaaccctattcagagaacaaaaagacaagacacactgtgagaagatatttacaaaatacaaacatgattttaaaaactgtattgaaaatacacaaagaactcttcaaacgaacactaagaaaactaaaaacccacataaaactgggtaaatatctgaacagacatccagccaaataaaatatatagatagcaggccaggtgtggtggctcatgcctataaccccagcactttgggaggctgaggtgggtgagtcacctgaggtcaggaatttgagatcagcctggccaacatagtgataccccctctctactaaaaatacaaaaaaattagccaggcatggtggtgagtgcctgtaatcccagctacttgggaggctgatgcaagagaattgcttgaacatcggaggtggaggttgcagtgacccaggatcacaccactgcactccagcctgagtgacagaatgagactctatctcaataaaaaaaaaagaaaaaagaaaaaaaagaaaatatacagatagcacataatcacacaaaaggatgctcaatatatctcattaggagactgcaaattaaaataatgctgagatatcactgcacacctagtacaactgtgggactcttaaaaaagctcaacagtaacaattggaagttgaagaacaataggtacggccattcattaatggcagaatgcatgaatgggtacagccactttgggaaatagtttgacagtttttcccaaagataaacaagtcttaccttacaatccaacaaatgcacccctaaattgtgtatgtttagacagctgctttgaaaaattatgttcaaacaaaaactagcatgtaattatatatgagccactctactcatcatggccaaaacttgaagtaatcagaacgttcttcaatagctgaatgcataatcaatttgaagtacaaccatgcaatggaataccattcaccaacagaaaggaatgaactgtcaatccatgaaaacaaatgaatgaatcttgcatctatgttgctaagtaaagggtggcagtatgaagatgctatacattatatgactccattcatataacattctggaaaaagcacaaccaaagagatgatagtcagatcagtgactgtctggggtggggatttgaagtattctgtatgctacttcagtagtggatatctgacactattcatttgataaaacccacagaattttaatgcacaaagaacaaatcacaatctacacaaattaaattatttaggatgtggaagtatctaaggacaaaatacagagtgaaaccaagaatctaactgtattaccaatgtatgttgcaagtggtgggccaaaggtgctgagctggaaatgagtagaatccatagactaaaaacaaaacgtactatatacacgaacagtggactctataaagttatttcccatagggataatagttaattttgaaactactatatctgtaaaaagaaaaataaccatgattttcctctatactatcaacactccacttttaacagcaaattgtggggggtggggggtgtttcccataccaaccaatattccaactctctggaaaacaattgggtatcctgtaattcaactgtgacactgattacctggagttagtctacaccctacaggttaagggcttagtaacaccagactgtccacaacctcagatgccaatcacaagttgtgaatccccagtttacccaaacttctatatgacttggctagaaactaggcattcctacaccccctcttcaggtttgacaatttgctatgatggcttatggaactaggaaatacttacttatgtttactagttattatggtctcaatgtgtgtacacccccaccccaaattcctattttgaaatgtaatccccaaagggatggtattcagaggtaaccgagaggtgatcggatcatgagagtgctgtcctcatgaatgaaaccagtgcccttataaaagcatctaggagcccgtttccccattctgccatgtcatgacatgctagaaggcactatctatgatagatgagccctcactagacatcaaatctgtcagccttgatctggaacttaccaaattccatattttaggaatttttatggaagcttcatcatgtagacatgacggattattaactcaatttccagtcccttcacaccctcaaaggattgcatgttaagctaaaagttacaaccttcttatcatggcttggtctttctggtgaccatccccatcctgaaaccatccaggaacccacagagtgtccttattagaacagaagccattcctattatccaggagattccaagagatttaggaactctgcgtcaggaaccagggccaaagaccaaatattagaacacaagagctcctagcagccctactgttcaggaaattataatagttttacaagctctgtaccaggaactgcagacacagaccaaacatatatttcttattaagtcccaacctggaatctcgatcaagaatgaattccttcttcccagtggtacaagggatgaaatgaaaggcagatagtaggagccaggttcctcactattacagcgagaagttacagataaaaaatagggaagcctagaatgatctcggtcataatgagtcagaatatatatatacaacgtaagtataaactcacattcaggttcctcattattacagtgagaagttacagataaaaaatagggaagcctagaatgatctctgtcataatgagtcagaatatatatagacaacgtaagtataaactcacattcaggttcctcactattacagtgagaagttacagataaaaaatagggaagcctagaatgatctctgtcataatgagtcagaatatatatatacaacgtaagtataaactcacattcaggttcctcactattacagcgagaagttacagataaaaaatagggaagcctagaatgatctctgtcataatgagtcagaatatatatatacaacgtaagtataaactcacattcaggttcctcactattacagtgagaagttacagataaaatatagggaagcctagaatgatctctgtcataatgagtcagaatatatatatacaacgtaagtataaactcacattcaggttcctcactattacagcgagaagttacagataaaaaatagggaagcctagaatgatctctgtcataatgagtcagaatatatatatacaacgtaagtataaactcacattcaggttcctcactattacagcgagaagttacagataaaaaatagggaagcctagaatgatctctgtcataatgagtcagaatatatatatacaacgtaagtataaactcacattcaggttcctcactattacagcgagaagttacagataaaaaatagggaagcctagaatgatctctgtcataatgagtcagaatatatatatacaacgtaagtataaactcacattcaggttcctcactattacagcgagaagttacagataaaaaaattcaggttcctcattattacagtgagaagttacagataaaaaatagggaagcctagaatgatctctgtcataatgagtcagaatatatatagacaacgtaagtataaactcacattcaggttcctcactattacagtgagaagttacagataaaaaatagggaagcctagaatgatctctgtcataatgagtcagaatatatatatacaacgtaagtataaactcacattcaggttcctcactattacagcgagaagttacagataaaaaatagggaagcctagaatgatctctgtcataatgagtcagaatatatatatacaacgtaagtataaactcacattcaggttcctcactattacagtgagaagttacagataaaatatagggaagcctagaatgatctctgtcataatgagtcagaatatatatatacaacgtaagtataaactcacattcaggttcctcactattacagcgagaagttacagataaaaaatagggaagcctagaatgatctctgtcataatgagtcagaatatatatatacaacgtaagtataaactcacattcaggttcctcactattacagtgagaagttacagataaaaaatagggaagcctagaatgatctcggtcataatgagtcagaatatatatatacaacgtaagtataaactcacattcaggttcctcactattacagtgagaagttacagataaaaaatagggaagcctagaatgatctctgtcataatgagtcagaatatatatatacaacgtaagtataaactcacattcaggttcctcactattacagtgagaagttacagataaaaaatagggaagcctagaatgatctcggtcataatgagtcagaatgtatatatacaacgtaagtataaactcacattcaggttcctcattattacagcgagaagttacagataaaaaatagggaagcctagaatgatctctgtcataatgagtcagaatatatatatacaacgtaagtataaactcacattcaggttcctcactattacagcgagaagttacagctaaaaaatagggaagcctagaatggtctctgtcataatgagtcagaatatatatatacaacgtaagtataaactcccattcaggttcctcactattacagcgagaagttacagataaaaaatagggaagcctagaatgatctcggtcataatgagtcagaatgtatatatacaacgtaagtataaactcatattcaggttcctcattattacagcgagaagttagagataaaaaatagggaagcctagaatgatctctgtcataatgagtcagaatatatatatacaacgtaagtataaactcacattcaggttcctcactattacagcgagaagttacagataaaaaatagggaagcctagaatggtctctgtcataatgagtcagaatatatatatacaacgtaagtataaactcacattcaggttcctcactattacagcgagaagttacagataaaaaatagggaagcctagaatgatctcggtcataatgagtcagaatatatatatacaacgtaagtataaactcacattcaggttcctcactattacagcgagaagttacagataaaaaatagggaagcctagaatgatctcggtcataatgagtcagaatatatatatacaacgtaagtataaactcacattcaggttcctcactattacagtgagaagttacagataaaaaatagggaagcctagaatgatctcggtcataatgagtcagaatgtatatatacaacgtaagtataaactcacattcaggttcctcattattacagcgagaagttacagataaaaaatagggaagcctagaatgatctctgtcataatgagtcagaatatatatatacaacgtaagtataaactcacattcaggttcctcactattacagcgagaagttacagctaaaaaatagggaagcctagaatggtctctgtcataatgagtcagaatatatatatacaacgtaagtataaactcccattcaggttcctcactattacagcgagaagttacagataaaaaatagggaagcctagaatgatctcggtcataatgagtcagaatgtatatatacaacgtaagtataaactcatattcaggttcctcattattagagcgagaagttagagataaaaaatagggaagcctagaatgatctctgtcataatgagtcagaatatatatatacaacgtaagtataaactcacattcaggttcctcactattacagcgagaagttacagataaaaaatagggaagcctagaatggtctctgtcataatgagtcagaatatatatatacaacgtaagtataaactcacattcaggttcctcactattacagcgagaagttacagataaaaaatagggaagcctagaatgatctcggtcataatgagtcagaatatatatatacaacgtaagtataaactcacattcaggttcctcactattacagcgagaagttacagataaaaaatagggaagcctagaatgatctcggtcataatgagtcagaatatatatatacaacgtgagtataaactcacattcaggttcctcactattacagcgagaagttacagataaaaaatagggaagcctagaatgatctcggtcataatgagtcagaatatatatatacaacgtaagtataaactcacattcaggttcctcactattacagcgagaagttacagataaaaaatagggaagcctagaatgatctctgtcataatgagtcagaatatatatatacaacgtaagtataaactcacattcaggttcctcactattacagcgagaagttacagataaaaaatagggaagcctagaatgatctcggtcataatgagtcagaatatatatatacaacgtaagtataaactcacattcaggttcctcactattacagcgagaagttacagataaaaaatagggaagcctagaatgatctctgtcataatgagtcagaatatatatatacaacgtaagtataaactcacattcaggttcctcactattacagcgagaagttacagataaaaaatagggaagcctagaatgatctcggtcataatgagtcagaatatatatatacaacgtaagtataaactcacattcaggttcctcactattacagtgagaagttacagataaaaaatagggaagcctagaatgatctcggtcataatgagtcagaatgtatatatacaacgtaagtataaactcacattcaggttcctcattattacagcgagaagttacagataaaaaatagggaagcctagaatgatctctgtcataatgagtcagaatatatatatacaacgtaagtataaactcacattcaggttcctcactattacagcgagaagttacagataaaaaatagggaagcctagaatggtctctgtcataatgagtcagaatatatatatacaacgtaagtataaactcacattcaggttcctcactattacagcgagaagttacagataaaaaatagggaagcctagaatgatctctgtcataatgagtcagaatatatatacacaacgtaagtataaactcacattcaggttcctcactattacagcgagaagttacagataaaaaatagggtagcctagaatgatctctgtcataatgagtcagaatatatatatacaacgtaagtataaactcacattcaggttcctcactattacagcgagaagttacagataaaaaatagggaagcctagaatgatctctgtcataatgagtcagaatatatataaacaacgtaagtataaactcacattcaggttcctcactattacagcgagaagttacagataaaaaatagggaagcctagaatgatctctgtcataatgagtcagaatatatatatgcaacgtaagtataaactcacattcaggttcctcactattacagcgagaagttacagataaaaaatagggaagcctagaatgatctctgtcataatgagtcagaatatatatatacaacgtaagtataaactcacattcaggttcctcactattacagcgagaagttacagataaaaaatagggaagcctagaatgatctctgtcataatgagtcagaatatatatatacaacgtaagtataaactcacattcaggttcctcactattacagcgagaagttacacataaaaaatagggaagcctagaatgatctcggtcataatgagtcagaatatatatatacaacgtaagtataaactcacattcaggttcctcactattacagcgagaagttacagataaaaaatagggaagcctagaatgatctctgtcataatgagtcagaatatatatatacaacgtaagtataaactcacattcaggttcctcactattacagcgagaagttacagataaaaaatagggaagcctagaatgatctctgtcataatgagtcagaatatatatatacaacgtgagtataaactcacattcaggctcctcactattacagcgagaagttacagataaaaaatagggaagcctagaatgatctcggtcataatgagtcagaatatatatatacaacgtaagtataaactcacattcaggttcctcactattacagcgagaagttacagataaaaaatagggaagcctagaatgatctctgtcataatgagtcagaatatatatatacaacataagtataaactcacattcaggttcctcactattacagcgagaagttacagataaaaaatagggaagcctagaatgatctctgtcataatgagtcagaatatatatatacaacgtaagtataaactcacattcaggttcctcactattacagcgagaagttacagataaaaaatagggaagcctagaatgatctctgtcataatgagtcagaatatatatatacaacgtaagtataaactcacattcaggttcctcactattacagcgagaagttacagataaaaaatagggaagcctagaatgatctctgtcataatgagtcagaatatatatatgcaacgtaagtataaactcacattcaggttcctcactattacagcgagaagttacagataaaaaatagggaagcctagaatgatctctgtcataatgagtcagaatatatatatacaacgtaagtataaactcacattcaggttcctcactattacagcgagaagttacagataaaaaatagggaagcctagaatgatctctgtcataatgagtcagaatatatatatacaacgtaagtataaactcacattcaggttcctcactattacagcgagaagttacagataaaaaatagggaagcctagaatgatctctgtcataatgagtcagaatatatatatacaacgtaagtataaactcacattcaggttcctcactattacagcgagaagttacagataaaaaatagggaagcctagaatgatctcggtcataatgagtcagaatatatatatacaacgtaagtataaactcacattcaggttcctcactattacagcaagaagttacagataaaaaatagggaagcctagaatgatctctgtcataatgagtcagaatatatatatacaacgtaagtataaactcacatttagcttaacatatacatagatggttccacatagaaacctttataattacgtgggtacatataagttagaagacacacatatatttctttgcactgtcagctgtaagtgtcatgatgcaatgaccacatttagtggccagatgtaagtttttcataccattctctaacaaaagaaatcagggctattagaagaaatagctgaaactaggactgggacagaaaatatatgagccagggtacttttgaagtaacagaaataaattataaaaaaaaaacatgaaattatgtaaaaggagccagtggaaagagctaccaatggccacaggtatgaacaaagagcaacaaaatactgtacaattagataacaaccaaaagattaaagtaactatctgtggacccatactggtataaataaatgattaaacagatatgcaaatggactgaatagaaatctcttacacagaagaattccaaatacctgatatagacagccatcaaggaggtggggctaactccccactcctttaagtatgagctctgcatgatgacttcctccaaaagcatacatacaatatagacatgggaaaaaagtaacttcacagtgaaaaacctgaaaacactgcctcacccaagtgataaaagttaacattaatggtgataacacatcttgagagcatgaagtgactagactagcacttgcaaaccaaaaataaaattcaaagatctttcccacaaccacctctccaccaggggacaccaaagttaacctggaagactggttcaggctatgatgggaaagaggtggtcagacatgcctcattatgccctcctcccttttggaattcaggaaaagccaatcagcatttaacatcaacacaaccttaaatctgataagaaacatttacaatctattctctctgaagcctgctacctggaagcttcatctccatgataaaaccttggcctccttaaccccttatcataacccagacactcctttctattgatagtaagtctttcaacaaactgccaatcagaaaaattttaagtgtacctataacctggaagccccaccccaccctaatccactgggttgtcccacctttctggaccgaaccaatatatatcttaaatacacttgattgatgtctcctacctccctaaaatgtatagaaccaacctgcaccccaacgaccttgggcacatgttctcagggtctcctgagggctgtgtcaagggccatggtcactcatatttggctcagaatacatctcttcaaatattttacagtctttgactctttttgtggacacactacacatctgctctgcttcccccaaacccctaaacccaggctgattatgagaaaaaccccaagtaaaccacaatggaggacattctacacaatacctgaccaatcctcctaacactgttccaggtcctcagaagtaaagtctgagagactgtcacagccaagaagagcctgacatgatgactaaatgtcctatgggatcctagataggatcctgggagagaaaaaggcagaactaagggaaaccaaataagatgtgagcttatttaataatatagtaatatccagtcattaagtatgacaagaaatgatgtaagatgttggtcaggagtggtggctcatgcctgtaatcccagcactttgggaggctgaggcgggcagatcacctgagatcaggagttcgagaccagcctggccaacgtggtgaaacctcatctctactaaaaatacaaaaattagccgggcacgatggcaggcgcctgtaataccagctactcaggaggctgaggcaggagaatcgcttgaacctgggaggcggaggttgcagtgagccgagatcatgccactgcactccagcctggttgaaaaaaaaaaaaaactggtctggaaaaaagaaaaaaaaaaaaagatgttaaacctatctgatacatgttgatatgttaaaaagaggggaaactaggttgcgtctacatgggaaatctgcattttcttcccaatttctgtatgaatctaaaactaatttaaaataaaacctctatttaaaaattgtaattttttcagatatctgctaaattatttgtactaaaaattagtaattgacagtaactactcctacttttaaaaataagagcattcatgatactgcaaagtaaattatacagactaatatatactttcaaagaaatgccccttttacatgttttatgttaagataacatatatgtgtaaacatggtcatatcatttttcttatggtgtagttcactctctaagaaagctggtcatcttagaaccagggaaaaaaattcacattttggagactatttcaatttatggctggacattttcaaagtatgactttgtgaaaaaaaaaaaagttcaaattgattcattgtgactggatcacttattctaatgaatgcttgtctttattttgtttcccagcattcctttcagctacgatacaacagaagcaaatatttgccactggaaaaaatattcaaagacactcttaggttaatctatagctgatgacagtcagtctagtctacatagcaagcagcttcaagatatgattacttagctaagcgggaaatgggacgtgactgctgcctcattcccacgcctctctggacctgataatttagaggaagctcacattcgcaagataaaaattttcttttctttctcagtattaaatatgctgtcacagtagaagaaagctttactgacttcttaaatgatgtgttgagaccggaaacctaaaatgatagttactgagaatagtgctaatgccctaagactggaaccctaaaatgatagtcactgagaatactgctaatgccctaagaccggaaccctaaaatgatagttactgagaatagtgctaatgccctaagaccggaaccctaaaatgatagttactgagaatactgctaatgccctaagaccggaaccctaaaatgatagttactgagaatagtgctaatgccctaagaccggaaccctaaaatgatagttactgagaatagtgctaatgccctaagaccggaaccctaaaatgatagtcactgagaataccgctaatgccctaagaccggaaccctaaaatgatagtcactgagaatactgctaatgccctaagaccggaaccctaaaatgatagtcactgagaatagtgctaatgccctaagaccggaaccctaaaatgatagtcactgagaatactgctaatgccctaagaccggaaccctaaaatgatagttactgagaatactgctaatgccctaagaccggaaccctaaaatgatagttactgagaataccgctaatgccctaaggttttagtcacaccctcacctaggcaggaacccaatcaaaaggggagaactgtggaacaaactacgggaggtcattgtttcggtcaccactcccgcactaggccacactgagcaggcaaaaccagaatggagacactcacgctgaatgacacacaacgaagctgaaactctaaggaagtagatagatcccaaaagagctccctttttccctgaagagattccagtctacctgagtcagcataaagaagtcccctctgctttaattcttaccaaaacaagtaacttgaagtaatctgatattaacaaatcagttgttattttctattgctctatttccgccttacacaacacagtgttctgctattgcccagagggcactgagaccaaataaaacttgaaaatgccacactgaaagcaaataagtcctaataactcaacttacaacgataacaaagagtgacaccaatgcccaaagttttgatcaatatctcaaaattgagaggctgaccaaaagggaggaattcttacatcaaacaacatttgggctctggaagcctcccgaggagtccttgtaaagagtcgcggccgggcgccgtggctcacgcctgtaatcccggcactttgggaggccgagacgggtggctcatgaggtcaggaaatcgagtccatcatggcttacaaggtgaaacccagtctctactaaaaaaaaaaaatacaaaaaaattagcagggcttggtggcggcagcctgcagtcccagctacttgggaggccgggacaggagaatggcatgaacccgggaggcggagcttgctgtgagctgagatcgcgccactgcactccagcctgggcgacagagcgagactccgcctcaaaaaagaaaaaagaagaagaacaagaagaatcgcaacctaatttagtatagaaacaaactgaaaatctgacttgggaatgtatcatggtaacaaatagcggcggttcagccaatcacatcagccgagtgtcagtcaatggccggcagccagctgttcaaaacaagttccaagaaggcaaatccgggctgtaaccaggtctgtaaccaatccagccacctctatacctcacttctgttttctgtatgtcacctttttcctctggctataaatataacccgcacatgttgtgtggcagatcattctgaaccatttttggtctggactgctgcctgattctagaaccacaaaaaaaagccaattaagatctgcaaacccacatttgttgtaattctgtattttaacagttgtgccctacaaaagacattaagctgaaattaattaaaaatcatttacggtcatgattaggtcataaaaaattgtcaaacataacaattcttcaaaaaaagctaaaaagtatattttaaaaatattgttgatggaaaaaagagtgcaaaagtagataggaaaattatgtacaaaactaaaaacagaggagaaattaaaagtcaaataattacatcaaactggaaacctagaaaaaatgggtgatttcctagtaaaaatacacattaacaaaatgggccctgaaataaggcaactatgaatataccaattagcatagaaaagctaagaaaggtccttaaagatctcccagtggaaaaaggccccaggaccatctgggtccatagcttagtgtaagctgacttaactaaatgtgattttacactcgtgcattgcatacatatgatggtggtcccatgagataaaaatggagctgaaaaattccttcctagccatcttgtcataagctcatggctcaacgcattaccttttctctgttctgataccatgaaaggaaaataaatctcaggacccccaaatcactaagccaagggaaaagtcaagctgggagctatgtcaggcaaacctgccctcattctattcctaactaagatagctacaaagataaaaagctacatacctcactcacaatttgcccacaaagaatttccttttggacaaaggacagacagcactcaaagtcatccctcacctgagacagatgcatatctgattgcttcctctgccctattatttatgtaaaaatgcagattcattgagccagactaaattgtgtattcagtggaaggctgatgaaggattcaaaagaatgcaaccttttgtctctaacctacttctgacctggaagcacccccacttcctgcttccagttgtcccgccttactgggccaaatgactgtacatcttacacgtctcatgtatccctaaaatgtacaaaagcaagctctaccctggccaccttggacacacgtcgtcaggacctcctgaggctgtgtcatggtcgtgtccttaatctgggcaaaataagctttctaaattgacagagacgcggcgcgccggcgcaggcgcacagaggcgcggcgcgcgggcgccggcgcacagtggcgcgtcccctggggggcggggggaggcgcggcgcaggcgcagagacgcacgtcgttaggctgtgggtttggggggaggtgggtggtgcagacgcagagtcacgcgccaccgggatgagagcgcgggggtggagcgttgtaggcgcacagactcacgtccccgggggcgcggcgcagagacgggttgaacctcagtaatccaaaaagccgggctcgggcgccccctgcttgcagccgggcactacaggacccgcttgcccgcggtgctgtcccagtgcgccccctgctagcgactagggcaactgcagggccctcttgcttacagtggtggccagcgccccctgctggcgccggggcactgcagggctctcttgctcgcaatatagtggcggcacgccgcctgcaggcagctagggacgttgcagggccctcttgctcacagtgtagtggccgcacgcccgcctgctggcagatggggacactgccaggccctcttgcttgcagtgtagtcggggcacgccctcttctggccgctgggggcacgacaggatcctcttgctcacagtgtagtggcagcacgacccctgctggcaaccagggcactgcatggtcctcttgctcatggtgtggtgcccgtacgccgcctgctggcagctgaggacactgcagggccctcttgctcacagtgtagtcgtcgtacgccccctgctggcagctggggacactgccggaccctattgctgtcggtgtcgtggcagcacgccacctgcgggcagatggggactaggcagggcactcttggtcccggtgtgacggcctcctgcaccactaaagtcagagcgccagttattaagccccatcagttctgtaaattcaaactgaaacggagctattactggggagagctgatgtcccagttcttgtttaacttggaagaaacattttcaccaagaggcagtacaaagatggcagataacttcattgaaaagaaacacagtgtaaagagtttattgtagaaaaatagggaggagtgggctgagcgtgcattaaaacagcctaagagtcctgtgcagggaattttattttggatttcttcacattcctgcctctgtctcaagtctccacctgttttctttgtctggttttcctgctactgccttagctccccaacttgccccacttaggcttgtgggacctcctcactgttggttgaggtacatgtgtggtgatcaatacgaatccactctggcagcagcctccatcccgccatcccaggcacgctgacagcgatcacgtttgtacctactgcgcctgcctcttttgaatgtccttctctgccctaatctgtacttatggtgccaggtttctcttaagaatgtcccctttggccttatcagcatgtagctagcaatattctgacatttttattgcagagtgaatgattggggcatcttcagaggagttctagagtgtttctttctgcataggtacctcttttccctcctacccacaattgacaagtgcccatccactccagcactagagatgctactaatatgtgaatttttggtggtccctccaggtgagccttcccagactttcccttttccaggaggccccctcctgttcatgtctagctacctatctactctaacaaagcccactatcctgtgtctttcccaaaaatagtgagggaacgattaattggaaaccataagaaatgatatggatatagacgaaaactttacaacttacacaaataatcactcaaaatcatccttacactaaaaatgcaaaactatacaatttctagaagaaacaatagaagaaaagctatctgcctttgggtttggtaatgaattttaacaaatgacacaaaaggtagatatacacaaaagaagtgacagtgtggatttcttaatatttaaagtttatactctggaagagaccttgttaagagaacaaaaagacaagccacatattgaagaaaatatttgcaaaatacacatctgagaaagaatttgtcttcaaaatatataaaaaattattaaaactaaacaataagttaaacagcccaactaaaaatgcacacacatctgaacagacacctcaccaaagaagatctacagatggcaagtaaacacattgaaaccacaatgtggttacaattgaaaaccacaatgagatagcacagctggtctatatctgttagaattgctaaactcttttaaaaatgacaaattgctgaaggaaaaacaagaactcttttcattgccagtggaacacagcatataagaccaaaatacgccaccccaaaacctaaccctaaccctaacccctaacccctaaccaaccctaaccctaaccctaaccctaacccctaacccctaaccctaaccctaaccctaaccctaaccctaacccctaacccctaaccctaaccctaaccctaaccctaaccctaacccctacccctaacccctaacccttaccggtgaccctactgtatccctgactcctaaccaacattgatccctaaccctaaaccccttactgtaactataatcttcatcccaccctatccctagccttagtgccatcccccaggctttttccaggatgggattttatgtgattgtttcgaataggtggaaatctctgctcatttaggagtcgttcaatgtaacaaggatcttggtcttcacagagaccctaaacgcgtgtggcccagggtcatgtggatgccatcagccactaggtggcagcaggggccctttggatttgaacaatgcagctcagtcagagggctggactgggacacccctactcatggtctctcttggcatggttttgtttggtgactccaggtgtcccaacctcctgtgtccattgtaatatgtcctgggaccatctcccccagggccttcaacctctccttgctatcctggctactgatggaagatgtacctcaagcctgtcccattcctcacttcctgctgagacctggccccaacatggccagctctatgttcctcagaccctctcaggccaccttctctcttctaggcactgtcactgggcttctccccaccccatagatccacagcccccaggtagtcctacagctgtgtccactcgtgcagcctgcacccccttcccctactcggccaccccatctgagtagtaaggggcccctgcctgattggagacccccagatgcagacccagatcacacagcacactgataagaggagggattcccaccttaaaagaaaggcgtgggaccaaccccagatcccaccactctcggcctcaagggcaggcatgactagaggcccttggtggccaggacccactgccttcttcaccgatcagttggcatggcctctcaccagtgttccctcctaacacacctgttctctctctcacacaccctaaagccgcttgccaaccacctgtcacacagccactccatgcctgttgctgcttggcacccactgggggccagggatgtgaacaaacctcatctaagctggctgccgggtcctaatgggcaggtccggtccgccctctaggagaggtgctgtccggtgaggcataaaatcccgggattctggctggaggcagctcctgagactgccggcatgaaggggagccgtgccctcctgctggtggccctcaccctgttctgcatctgccgtgagtctgtgccactggggtttccagaacattcaggggcgggggggagtggggggtacctgagaaggtaaaatcctggcatcgggcctctgcagtgaacactccacctgcttctgtcacagaagtgggcaaggaccctgcagaacccgcgcccaccctactccaccccaaccaaggacaaagcccagctgacccaacaccagcccagtgtctcctaccccagcccagtccagcctgacctgacccttcaagcctctggtcataatagcctctcatcaggggaaatttcccccacaccaggagcttaactttccttccctggtgatcccagggaatgctgagtggaaattggagcagctaagattaagggggatgtggaggggtcttcgggcaaggtggagttggaggtgttgtggaggaagccctggggaggagaggtgagcattgaaggggaaggtctggagaccatggaggttagagccctggggcaggtccagggctgtggttgcaccagagtcaccctgtcctgtcctggcatcatctcgctcgtgatgcagggatggccacgggggaggacaacgatgagtttttcatggacttcctgcaaacactactggtggggaccccagaggagctctatgaggggaccttgggcaagtacaatgtcaacgaagatgccaaggcagcaatgactgaactcaagtcctgcagagatggcctgcagccaatgcacaaggcggagctggtcaagctgctggtatgagggcggcgggcaccccattttctaaagatctgcagccttaccaagaccacccaacacagcacccacacagcctaccccacccacagacatccaccacccacagacattgcacccgcatcagccagctcaggtggacaccccagacctcctgtccaccgagcagcccccagactccatagacctcctccccagtctgtgggatactcctccatgcacacatgtgaacatacacagagatccaaacacaggtgcagacatgaaatgtacactgcgtgcacacatgtataaacacgttcacacccacatgctcacactgggatatgcacacacatacatgtgtgcacaccatcacatgtgcacacacacctcccagctgctgggaggagataggcagcaatatgccagaccccccccccactgagggccttgcttgcctgatggagctgtggctctccacttattgagcacagccctcttagtccacatgtgtctgccttccaggtgcaagtgctgggcagtcaggacggtgcctaagtggacctcagacatggctcagccataggacctgccacacaagcagccgtggacacaacgcccactaccacctcccacatggaaatgtatcctcaaaccgtttaatcaataaagcctcttccgcagctcaggctcctgtctctgcccccacagaggggcacacaaatggggacatcaggaacacactcgaggccacagccacacacacagacccacatacagaggatcccactcaaggagcacacgtgcaaaagtccccacagagggacacacaaatggggacatcaggaacacagggccacagccacacacacagacccacatacagaggatcctactcaaggagcacacgtgcgaaagtcccccacagagggacacacaaatggggacatcaggaacacagggccacagccacacacacagacccacacacagaggatcccactcaaggagcacacatgcgaaagtccccacagaggggcacacaagtggggacatcaggaacacagggccacagccacacacacagacccacacacagaggatcccactcaaggagcacacgtgcgaaagtccccacagaggggcacacaaatggggacatcaggaacacactcagggccacagccacacacacagacccacatacagaggatcccactcaagaagcacaagtgcgaaagtccccacagaggggcacacaaatggggacatcaggaacacactcggggccacagccacacacacagacccacatacagaggatcccactcaaggagcacacgtgcaaaagtccccacagaggggcacacaagtggggacatcaggaacacagggccacagccacacacacagacccacatacagaggatcccactcaaggaacacacgtgtgaaagtccccacagaggtacacacagggtccacacaggagcaggcacaccacaggcaagacccaaaatggaaatccaggcagacgccacgcaggcaggtggacagagcacagagccagacaacactgcgtggtcgtccggagggggcgtctggagggggcgtccggagggagacgggcggcagaggcagcggtatgaggcgggagccccagaaagaggaagtgtccaggactgggtggacacagaccccatgtcgcccatgggctaggtcagggcgggggtgctcagcatctgaaagctggtgtcgagccccaagaggacccctgacaaggccaagaaaaaggtacacccatgtccaagggggttgggagccgcaggtgagcagcctctgaggtcagccagggcagccccagcgcccacactgactcacacccaccacaaccagcacagaccctgatcctgaccctggatcccagactctcccacagccagaaccttccagcatttcagctgcccaatctatggtctcttctgggggcacagctgagtggaaccgccccatccttggccaccctgggtgctgagccctgacacttcactgccccggccctcctctccacacctctgtcctgtctgagcctggcaagggggccatgcggtgctgtcggctctgtgctctgtcccacctgcctacatggtatctgcctggatttccatttggctgagggagccctagggagggggccctggaggacttggttacaggggacctggtgaggggacccagtgagggggacttcatgggtgggtgcctggttgaggggacctggtgaaagaaacatggtgagggggcctggtgaggggtggtctggtgagggaacttagggaaacctggtgaggaggacctggtgaggggacatgggggggaccttggtgaggggacctggtgaggggacataggggggaccttggtgaggggacctggtgaggaggacctgggggggaccttggtgaggggacctggtgaggggaacatgggtggggagccttggtgaggggacctggtgaggggacataggggggccttggtgaggggacctggtgaggggacataggggggccttggtgaggggacatgggggggaccttggtgaggggacctggtgaggggacatgggggggaccttggtgaggggacctggtgaggggacatgggggggaccttggtgaggggacctggtgaggggacatgggggggaccttggtgaggggacctggtgaggggacataggggggccttggtgaggggacctggtgaggaggacctgggggggaccttggtgaggggacctggtgaggggaacatgggtggggagccttggtgaggggacctggtgaggggacatgggggggaccttggtgaggggacctggtgaggggacataggggggccttggtgaggggacatgggggggaccttggtgaggggacctggtgaggggacatgggggggaccttggtgaggggacctggtgaggggacatgggggggaccttggtgaggggacctggtgaggaggacctgggggggaccttggtgaggggagcatggtgaggggaacatgggtggggagccttggtgaggggacctggtgaggggacatggtgaggggacatgggggggaccttggtgaggggacctggtgaggggaacatgggtggggagccttggtgaggggacctggtgaggggacatggtgaggggagcctggtgaggggaacacggtgaggggaacatggtcagggggacttataggggtgtcctgttggggggacctggtggtgagatctggtgaggggatcaaaggcagaagccattgtcttggtcacatagacagaatctagaacctgtcatcccacagagccacattctagagtttagagtgggggacctctccccaattctgtaagcccatgaggagagaggaaggcctttctctccatgctccttttgcctaaccctaaccctaaccaccctaaccctgactctgaccctgaccctgaccctgaccctgaccctgaccctaactggacccgcacatctgagcctgcgtttccgtttccccgagagaccccggactccctcccccaaggacaggaacgcaacgcactggcagagctcgctgattggatgggggagagaagtgggcggagtgagcactaggagatcctgtcattggataagaaagagaagtgggcagggtgggcactggtagagtctctactggttggataggagcgagaagcgggcggggctagcactgagatcctgcaattggacgggcatgaagtaggtggggcgagcactgaggagaccctgccaattggacaagagagagaagtgggcggagtaagcattggtaaagcctgctgattgggcaagagacaggagtggtaggagcaaggactgcggagaaggctgctattggatgttagggaaaagagggcggaacaagaaggtggcgagctctgcagattggacaggagagataagcaggaggagcgagcaatgaatggagccagcggtgaaaagagccctgataactagacaggggagagcagtggaaccagaattcaggttacggtcacggtgacagccggaaaggaaattccagcatggatgccgaccgcaccaacccaaaactatgacccgagtcctaacccaccctaacccggccaaaaccgaacacccaaccctgactaaatgcgaaacgctgacccggacctggacctggacctagtacgaacccaagcctgaaccctaacccctaacccctaatcctgatcctagaccctaaccccgaccctaaaccctgaccctgaccctgaagggggacatagaggaaagagattgagaggtttgcatattcaatgacatacattttcttcgttagtcgatgttagaaagcaaaggcttttatctcgagaaatttctgacctaaagaatgatgtacaataaactgtattcaacaattgatcaacattttctaacaaggtggaatgaaaatataaagtgtggggattgctactagtcctaatacactaatctgtggttaggaaggtttatttttttccctccaaacctaagcagtacatgtcttaaattaccttccaaaacgtaagactcttggagcctcagacgggctggcgttagtcaatactccacggctgtttgttggatgagtggacaacagcatggtcgacaggtcctggtgcaaaatgtcttgggctgcctcagtttgaatcctgcttctgccatcgaccagccgtgtgattctgtaaaagtattttaacctctctgggccttagtttccccatctgtaacttgagggcctacctcaaatgggtccctggtgaagagtaacaagactatatccggagtaggtttcagttgccttttcctccgtctttccaccctcccctcctacccttccaaatcttttttttttttttttgacaaggtctccctctgttgcccaggctggagtgcggtggcgtgatctcggctcactgcaatccccactttccaggctcaagcgatcctcctcctcctacctcagcctcctgaaaagctggggctacaggtgtgtgccaccacgctaggctaattgtcattgtgtgtgtctctgtgtgtgtagaggcgtggtttctccatgttgaccaggctggtctcgaactccaggcctcaagcaattctcccacctcgacctccaaaagtgctaggacttacaggcgtgagccaccgcccccaccccttcaaatctattaaaaggtgagagtctcgccaaggcaatgagatcgcaatatgacgtttccatttactttggattatatgtcattataaatattaacaaataagacttaaaaaggacaccttcgggtaggtcagaccaaaatacaaaacttgtctgtgggactgcagtttgaggacagtgtctgcagccgtcacatggcagcaaaacggggttaagcagtgcacgagagtctgcgtcgacgacagccagagtccatgcatcgggaggttcactcggtttgcgaaggaacaacgggctcggcatgcacggcccgggctcggcgggcggacgggccggggcgcagttccccgcgctcgccactagaggtcaggaggtgaccgcttcggggctggaagacgggcccgtcggggattggcgcaggcggcgggcggggcggcgggcggggcggcgggcggggcggcgctggaggcagcgcctggttactgacacctggaatgactttttttttttggcatcagatttcctgtctttgtggggatgatggacccgagtaaagatgcccattcggggtcaaaggcagagccgcttctgcagcttctcaaagcgttgtttgtttgttttttttctgagacggagtcttgctctgtcgcccaggctggagtgcagtgccgcgatcttggctcactgcagccttcacctcccgggttcaagcgattctcgtgcctcagcctccctgagtagctgggactacaggcgtgcgccaccacacccggctaatttttgtatttttagtagagatggggtttcgccctgttggccaggcgggtttcgaactcctgacctcaggtgatccgccagcctcggcctcccaaagtgctgcaattacaggcgtgagccatcgtgcctcaaaacgctttaacagaaagacaatctgcacgggatctaaaagggtgctgagatcctagggaaggaaggatccaaacttcctggggagttcctgcccgagtgcctgtgctgcccctgggctggctggccagtaagcccgcctcccagcctgactgtccccatctttcggtcccagccccatttgcacagcctgggcagtagagggccctggactggggggctggagttctgggttcttgtcccagctgtgccccttcaggcccctttcacccactgggcctcacattccccatgtgcctaataaggaagtcatggtaggtggggggtacagcctcttctcgctttgccattcacttctgtgtcttcagagaggctgtcaaatctcctctctgaatgagacccccaaaaaagcaaagctaagaagatacccagagcttaactagacaccaggccttttagaaatagaccacctcttaccttaggcccccagagggtgcccattctgtgtggagaaaagaggagcccttgcctcagcccccagaggctagggtggggtggctgagttttggggccaggttagacacctctggggaagcctgaagtagcacggatggtttcaaagccagcggatgaggtggcaggacagtgacaagaccccaggtctccatcatgcacctgagcttactgagccttcacctggtgtctctgctgagtctccgacagaccaagagggaagggactgggggtaccgacccccagagagagaaagcggcagtcagaggacctgggtttgagtcctggttcaccccttcctggctgtgtggccttggcaaactactcagactctgggaacctgtttcacctgcaagatggggatgagaatcaaacccaccttgcagggctgtgaacatgcgttcagaccagtgcatgcaaaaaccttcacacaaaaacccttcctaaaggcagggagacaagtctccaggagcagcaggtggccagggactgtgtgggggctggggtcctgttttccccgcaacctgggaaaggcctgatgggcacttggtaggattcaaatcataaccctggacctcaggtggtggtgtgctttgtgtctgcagtggaaggtcccaccgtcgtgcctgtgagtccctctatcggtgttgaaggggtgggcagcaggcgggggagccccaggctggcagctagcaggacctctctggtgtgagctcagcacgccaattcccctgaagcgtggtgtccagcactctgggctgggggctgtggatcctggttccagctgtgtggggcctggaaggccctgggcaggtcacctgacctctctgggcctgtttccatcacacactgatgggctgagcacactgggactctggctgtgcaactccttggctctgcatttgttcacccagcgttcctgaggggcccttggtaggcagagaaagtttgtgggcttcaggcatgggccccaagattcagatactctcaagcctcctggggagtctcactcaggggagcagacaggcccaccagccagggtgattcttgctcagctcctggagggtggagctggccccacaggcctccccagagacaaggccctggacggccactgattactcccaaaagggacatctgtggcggtagtgggaccaagatgccacgagcaagcacccggaggcccccagtgtgagccatggagtggaggggaggggaaagggcagagtcaggacgtgtaggaatgcttgctttttttcccaagcacaagggacccttttctccactgcagctgacctgatgcttatgccaggaaggaggaggggcgggctccgtccttgaggtccctcaggagtagaaagagatcagagtgggagacttgggtctgaggtctgaacttgagcctacaccagtttctccatggtgtttccatcacgtcccccacctcctgcctcgagcctcacaccttcctaacaaaccctcccctggagaggagaccctgggtccacagcaccccggccccattggctttctctctccaggcgttttagaccactcccactgcctggactgcttttagaagccctcactcaccctccaaggccttacggaagcaccgcctcctccaggaagccgtccctgacctcccggcagagtcagcagagcccacggtacttgcagactggccaagctggtcttggtatttctcaccccagttggaatggtttgttcccagcttcctgactagatgggaactccctgagggcaggccctgtgtctcattcacccccagggcttgtggaatcattgagtgaagcatgtgccaatttacccatcatcaggagcctccgggaactctggcagactttcggccggcaggcccgcttcttccatctgtccagcagcgaaggagatgagggatgcagttaggctttcttgggctggagcagccagtcttcaaggtcccatcctccacctgtctgtctgctcaccacctccctcctctgttcccactgtccgccaaggcgcccccacactcctgtcctctcagccggggctggcctctagaagggtctttgctcccagatgggcgtgtccccttcccctgggcaggtgctgaggtctctttccaccaccggcctcttgggccccagagagctgagagccccccaccccagctccttgccctccccgtcccagagtggctgagccctccacatcctccgagcggggactgcagtggctctgtgtccaagcaggggttctggatctcccccagtgtgggggccacaggccttggtggctgctggggaagcccggggccggccgtgctgggcgcaggtggcggcaggggtagcagtggcgggtgggcgtcagtcgctgagcacagcccctgggagctcgctggtgagcgtgtgccagcgctcgatgcgcttgtccttgttcttcaggcagtcaaaccagtgcttcaggcgctcccccttggcgtggatgcccagaaccacaccacctgcaggaggacaggaggggcagctggggcacagggacccccaactcccaggcgtggggcccatgccccctcccaggttctgtgctcgaaggccagcctctcccactgcccgctgggttctgagcatgaacaggacctgacctccatgccacactctggccccgtcagggcccagccatcctgtctctcttccaccagggcagggataggggcagggtgcagaggcagcatcaggggtcaaggaatgggggcctgaagaggggagaaagggccgggcagccccactatgcgcagccaccaggcccactgggaatttggggcctctagggctcagagtccagcccgaggcactgcccatcattgtctcttgtctgtgctccaccacagagtgctgtgtgaccctcccagaactccttccatccctgggcctgtctcttcctggggcacaagggtcaggctggagaaggtctgaggcccctgacctaggggcaggtggtccgtggctccagctttccccatggaccaggaaagaggggctgtggcctgatccaggacaggcacacagtgagacggtgttcccactatgcccccttaccaatgaaatcgttggattttccaatgtcgtaatcccaaacggtgacctccagggacttcttggccaggtccccatgcttgatctcgtaacagaactcctgctggcaagaagggagtgttagggctgatgcctgggcctgggcctccgccgggggccaggaggggtatgaggtgtagggacagaggagggatgggggtgatcagtgctcagagtggatgatgggtggatgctcacatgtctcgcccacttccccctgagctccactggggtcttcagggcccctgtcccctcgcccgcttgctccttgtccctgagcctgctctccccacaccccgggagcctcctgactgcagaggcactgcacgccccacagtccttgtcatcctgggcctctctggggcctggctttgctgacccctcccttctctgtgggaccctcccttccatccggggttcccctcactctctggaagcatcttgacctcccctgcctgcctctggatcactggtgtggtgtgggctctacccaaggcccctctgctcttctttccttcttgttccttggggggaatccgcatttccagccgtacttgccgccttgggcggaagacttcctggggccccagggtgtctcgagtccccttgccccacacagagtttctccccatcttcctcaccccctctttgccctgttgcctccatgaggaaccgaggactcccctcaacacttccctccccccagccctacatccgacaagtcctgccaagagctttccaggggtcccccagctcccctgtgtctgtggcttggtgcggcccctccccaccgtctctgaccaccctccccatcccgccatgaccttttgaaaacccagccacacccccactgctgtggggcagaggaatggccttcatgaagcttcaccagcccctcatacctcattaaactccgggttcagggtttttttcttcaccgctgtcttatgtttggatttcttgtccacatctggcctcaggtatctggaattacatccaacggacaggcagaggatggggacatgctatggggtatagatcaagccagcaggtattcaaagagctttctgtccctggagagagattcctgggcccttcttttgtcctaatcattggattttcccaacgctattttgtggcaaaggcgagacgttgttttcgagaagcaagtggtcccttcatccaccgcacttctgttcacacacacattcctgaagttaaccctggggggcgccctccatccccctaggaaaggggtttttcctcatttctggaagtctaattttcataaagctcacatttcccaccagaacagagtttttagcagagttggtctcttgttcaaacttctttttttttttcagatggctgactgcaacctctgcctcccgggttcaagtgattctcctgcctcagcctccagagtagctgggactacaggcatgtgccgccatgcgcaggtaatttttgtattttcagtagagacagggtttcaccatgttggccaggctggtctctagctcctgacctcaggtgatccacctgcctcggcctcccaaagtgctgggattacaggcgtgagccaccacccccggcctcaagcttcttttataaaatagcagatttattgagatataattcacataccataaaatccatccttctgaagtgtaaaacgcagtagcctttagtagactcccagagttgtacatccatcaccactacctccattggagctttgaggaaggacaagaccttttgtgcagtcacacggaggccacctagatgttcttccctccacagccactaaggccttaggctctgatgcagaacagctgtcttcctctgaggctcagagagggggagtgacttgcccaaggtcacacagcctgcaagcacaagcgtggtgcttgaaagccaggctcagactcctttctctatgacagggaggtcatgtgcaggctggagaaggggacaagaggtccccaacttctttgcaaagcttctcaccctgttcctgcatagataattgcatgacaattgccttgtccctgctgaatgtgctctggggtctctggggtctcacccacgaccaactccctgggcctggcaccagggagcttaacaaacatctgtccagcgaatacctgcatccctagaagtgaagccaccgcccaaagacacgcccatgtccagcttaacctgcatccctagaagtgaaggcaccgcccaaagacacgcccatgtccagcttattctgcccagttcctctccagaaaggctgcatggttgacacacagtgcctgcgacaaagctgaatgctatcatttaaaaactccttgctggtttgagaggcagaaaatgatatctcatagttgctttactttgcatattttaaaattgtgactttcatggcataaataatactggtttattacagaagcactagaaaatgcatgtggacaaaagttgggattaggagagagaaatgaagacatatgtccacacaaaaacctgttcattgcagctttctaccatcaccaaaaattgcaaacaaccacacgcccttcaactggggaactcatcaacaacaaacttgtggtttacccacacaatggaagaccacttagcaacaaaaaggaccaaactcctggtacatgcaactgacagatgaatctcaaacgcattcctccgtgtgaaagaagccggactcacagggcaacacactatctgactgtttcatgggaaagtctggaaacggcaacaccattgagacagaaaacaggtgagtggttgcctggggccagggaactttctggggtcatattctctgtgttgattctggtggtggaaacaagactgtcccagcctgggtgatacagcgagaccccatctctaccaaaaaattaaaaattagctgggcatggtggtgcatgcctgtagtcccagctattcacagtgctgaggtgggaagatgcttgagcccaggagttcaaggctgcaatgagctatgattgcgccactgcactttggcctggacaacagagcaaaaccctgtctctaaaaaaagaaaagaaaagaaaaactcactggatatgaatgatacaggttgaggatccattatctgaaatgcttggaccagatgttttgaattttggattttttcatattttgtaatctttgcagtatatttaccagttcagcatccctaactcaaaaattcaaaaatctgaaatcccaaacgcgccaataagcattccctttgagcgtcatgtcggtgcttggaatgtttggggttttggatttacagctttgggacgctcaacctgtacctcaataaacctgattttaaaaaagtttggggggattcccctaagcccgccacccggagacagcggatttccttagttacttactatgctccttggccatttctctaggtattggtatattgtgtctgctgtgaactgtccttggcctgtttggtgacgggtgaggagcagggacagaagggtcctgcgtgccctgccttcacaagcccctggaaggaaagttgttttgggatctctgcaccctcagcctggacaacttgtgcccatctggtgacccctcactcagccaccagacttccacgacaggctccagcctcggcaccttcagccatggacagttccgccagcgttgccctctgttctgctgttttctctaccagaagtgcccttccctcctcacctgaccactctggggaaatccctcagcaccctccctgagcataccctactctggcacaagcccaccctgcaaagcccctgaggcccgccctgtggcgtctctccctcccttgctgtcaggacagtggtcctggccaccggggctcacggagccgccctgtgccgtgtacctctgagccctctgcacagtgccttctgcttgcctgtggctttgagaagaaaccccttctggttatacataagacagccagagaagggagttgcccagggtggcacagcacgttgctgccagttactgccattttcacgggcatgaaatggagataacaacaggagcgaccgcacaggctgctgagcgcgtcacacgcagccatcgcgcagctcagggatattacgtgtaactcgacatgtcagcgattgtcacaggcactgctactcctggggttttccatcaaaccctcaagagctgggcctggggtcaacttccggcctggggaaactggggcaagtatcaccagagatgagctttataaaaataatggtgctagctgggcatggtggcttgcacctgtaatcccagcactttgggaggccgagctaggaggatcgtttgagtccagcagtttgagaccagcctggccaatacggcaaaacccagtctctacaaaaaatacaaaaaacaactagccaggcgtggtggtgcacacctgtagtcccagctactcaggaggctgagggggaaggactgcttgagcccaggagtttgaggctgctgtgagctgtgatcgcatcactgcattccagcccggtgacagagtgagtcactgtctcaaaaaagaaaggaagaaataaagaaaacaaataaaaataatagtgcagacaaaaggccttgacccatctagctttggccctcagcatcaaccgctagatacgtccctccctttcttctggggcacaggtcacactctcttccaggtctaggatgcagctgaggggtgcccctcttaccatctaatctgtgcccttatttcctctgctttagtgaggaagaggcccctggtccatgaaggggcctttcagagacggggacccctgaggagccccgagcagcagccgtcgtgtctcacccagggtgtctgaaacagatgtggaggtctcgggtgaggcgtggctcagatacagggagtggcccacagctcggcctgtctttgaaaggccacgtgacctggcccacggctggcaggtgggacccagctgcaggggtccagcagcacccacagcagccacctgtggcagggaggagcttgtggtacagtggacaggccctgcccagatggccccccgcctgcctgtggaagttgaccagaccatctgtcacagcaggtaagactctgctttctgggcaacccagcaggtgaccctggaattcctgtccatctggcaggtgggcattgaaactggtttaaaaatgtcacaccataggccgggcacagtggctcacgcctgtaatcccagccctttgggaggccagggtgggtggatcacttgaggtcaggagttcaagaccagcctggccaacatggtgaaaccccgtctactaaaaatacaaaaattagcctggcgtggtggcgcatgcctgtaatcccagctacttgggaagctgagggatgagaactgcttgaacctgggaggcagacgttgcagtgagctgagatcacgccactgcactccagcctgggcaacagagtaagactctgtctcaaaaaaaaaaaaatcacaccattttggcttcagattgcatatcctcctgcaaggatatatacgcgtgaaattcaagtcaatgacaaatcagaagaaaaaacatatatatacgcaaaccagtatcctactgtgtgtgtcgtttgttgtgttttcgacagctgtccgtgttataataattcctctagttcaaatttattcatttttaacttcatagtaccacattctacacactgcccatgtcccctcaagcttcccctggctcctgcaaccacaaatctactctctgcctctgtgggttgacctattctggacacgtcatagaaatagagtcctgcaacacgtggccgtctgtgtctggcttctctcgcttagcatcttgtttccaaggtcctcccacagtgtagcatgcacctgctacactccttcttagggctgatattccacgcacctgctacactccttcttatggctgatattccacgcacctgctacactccttcttagggctgatattccacacacccgctacactccttcttagggctgatattccacgcacccgctacactccttcttagggctgatattccacgcacctgctacactccttcttagggctgatattccacgcacctgctacactccttcttagggctgatattccacgcacctgctacactccttcttagggctgatattccacgcacctgctacactccttcttatgactgatattccacgcacctgctacactccttcttagggctgatattccactgcagggacagacttcatttgtgtatccattcatcagtggatggacacttggggtgtttccacttttggctgttgtggatagtgctgctatgaacattcctgcacaagttttaggatggacatgtttttcttatctcttgggtatataacaaggagtggaattgccagatcaaatggtgattctgtgtttaactttctgaggaactatcagctgcttcccaaagtggccatcccattattctcatattatttttatttgtttattatattttgagagtgtctcgctctgtcaccctggctggagtgcagtggtgtgatctcggctcactgcaatctccacctcccaggttgaagtgattttcctgcctcagcctcccaagtagctgcgattacaggcgcccgccaccacacccagctaatttttttatttttagtagagacgggtttccccatattggccaagctggtctcaaactcctgacctcaggtgatccgtgcgcctcggcctcccaaagtactgggattacaagcacgagccactgcactcagcctaatttattactatttttaactgtagagacaaggtctcagtatgttgccaaggctggtctcaaattcctgggttcaagcaatcctctcaagtagttaggactacagggacatgccactacaccaggctaatttttaatttttttatagagatggaggtctcactatgttgcccaggatggtctcaaactcctagcctcaagcaatcctcctgccttggcctcccaaagtgttcagaatgtaagtgtaactcactgcacctgccacatacaatttttaaagtgacagaaatatgatcatggccatgggaatggtgcccctagagctgtgccacgaggagtactggcctcttcatggtgccaagatgtccctgaggccttagtcacctgggtccttggtgtcccctaggtcagggccatccctctgtcattccccctccctgaagcacctgcccctcctttctgctgaactaaattcctccccaagtctcagttttccagagtctccctgtgagctcacactcatacctacctagtttctgaagagccccgagcactgacggtagtcactgtggcacctgtagcaccctctccaaagggtcgccagctcctgcctggctctcagagctacacagcctctcctgaccaggctcacagctccacagctctgcggcccaggccacctggcatggccccctgagttagtgtctctccccaggcccaccatcagccctgttggtagagctgggtggactcttatccgcatctgtagcaccattatagggctgggcaaatgtgggcagttgcaaaggcctggcagagttcctctgcatcctcccccagcctcctggctacccccggcactggccccgccttctgtcccctcctgcaactcatggcccctcctgggcccctcagtcacagagaggcctggacatagcatcaggtgataactaatacctgcatgaccctgggaagccactcagcttctctgtccctcagtttccccatctgtgaaatgggctggccatgcttaacccctggagttgccaaggtagcccatcagggaacacagcgcccctgtacctcaggcactccctgggtgcctgccacctgggaccacggagccggcacacggacccccgtccttggaggtgaagacgtggcaggtggtcacgcgcacggcacactcacgttttcacgtaggggtccgagtagccgttggcgtccatggcggccaggtgggcgcaccgcacgatgcctaccagcaggccttgcttctgtgagctgtacttgagggagatgaggatgcggccccgctcctccagggacttgtcttcagtcttgtccacctgttggacgggacggtcactcagtcctcacctgctcccacccctctcttggccgtccttggcctcctcttcctgagcccgcccatccggctgctgcagccgggcctggtcacggtccctggtgagtggcctcactgtgaactcacagcccttctgtcatctcttccctcccaagggctcttccagggctggatctgacccacaccctccctgttcttggctgcatgtggcctacggtggccttcacagcccagcaagggccagcccaggggttggcaactgcagcccgggggccagatcaggcccgacgcctggctctgtgtgggatgtgagctaagcatggctcttacccttatcttaaacaatttctttttcaaaaaaatagagacaggggtctcactattttgcccaggctgatctcaaactcctgggctcaagggatcttcccaccttggcctcccaaagtgctgggattacagacatgagccaccgtgcccagctggttcttactttttggaatggcagaaagaaaaatgaaatgaaaaatattttgtgacacatgaaaatgacatgaaattcacacttcagcttccattaacaccgtgttgttggaacgcagccttgccagctccgtgatgcttctctatggctgcttttgccctaaggacagagctgcatggtggccacagattgcgaggcacacagagcctaacattagcgctaagcggcccttcacgggtctgcagcccccggcctggcgcgctcggcttccgcggacggtcttccaccaggtcctcctcacagcccgcccggactttcccttggctttgaagccgggtcccacctccacacctttgcgcacccttaatccacagctccagcaccctcctctgacctcctcagtgttcaccgttgataaattcctggtccttctgggcctggggggcttttctgaccctcagggtgggttggccgtcccctctgcgcgcccactgcctcgggtttatcctgtcatggcctggtgtggccccctgcttcctcagggctctgccccagcctctaagttccttgaagttggaactctacctgtaaattttgattttgacagagtctgactcttgtcacccaggctggagtgcagtggcatgatcttggctcactacaacctctgcctcccgggtttaagcgattctcctgcctcagccttctgagtagctgggactacagtctaatttttctattttttggtagagacagggttttgccatgtctgccaggctggtctcgaattcctgacctcaagtgatccacccacctcagcctcctgaagtgctgggattacaggtatgagccaccgcatccagataatacctgcgtcatctttaatacctcagggctgggcaaggccctggcactaagggcccactggaggcttgtactagtgaaggcaggaatggagggacagatggtcccctgtgcgttcaacctcatacaagcaactccagcctggaggttcaaagaaaggcagaaaggtctgcccatgacaatggagcctggtggatggaaaagggtcaccgtggccccagttccctgaaggtgctacctggagcctctcagggtgctggatgtggctccctcaggagaaccccgaagacagagttctggtacattcctcaccctggagaagctgggagccaagtagggagcccatccagtgccttccctgcctcagcagctgccagtgcctgcctctcaaggcagatctcagctccaggcctccccatccccagccagcctgatgcttctccattccttgccctcccgagactacccggcttcttccttctggctgctgcacaccccaaaccctctctcctaggccctcagcccccccagacaaacccagcttgagcccacccacacacgcccagcttgagccctgtgtccccctggatccccttaggactctaccaggctcctctcccaagcagccccagccacctccttttgcccacaaccgtgccctgcctaacaccaaagtgagtccctctggctacatctaaccctttctggagatgagactcctgtgaggtgagcagggatgttgagcagggaagacatacatgccccaccagccaccttcgccacctcccacgcccagagcagacatggctaatcgatcctagcatttgccctaggctccaatgccacctcagaatccttttcaacacagtgctcaggcagccattcctggtggatcaggccaggcctgcgagatctcgctatctgccgctcaggcagagctttgtgtgtgagggccttgatgccctgtgctgcttgtgtcagtgtgtgtggtgtgaaaattaaacaatataaactagcaggggccaggcacagtgactcatgcctgtaaccccagcactttgggaggccaaggcgggcagatcacctgaggtcagcagctcaggaccagcctggccaacatggtgaaaccccatctctactaaaaatacaaaaattagccgggtgtggtggcgcatgcctgtaatcccagctattgggaggctgaggcagaagaatcacttgaacccgggaggcggaggttgaagtaagccgacattgcgccactgcactccagcctgggcgacatagactccatctcataaaaaaaaaaaaaaaacaaccaaccagcaggcatatttttagctcttttttcaggggtgggacattgtacttcgggttgtttcatatgaagaccactgggtcttgctcagtattgacttaaaacagataatgttcgcagactgtaaattctaaaacctaccgccagaggcctggcacaggggctcatgcctgtaatcccagcactttgggaggccgaggcaggaggatcactggaggtcaggagtttgagacttgcctggccaacatggcgaacccccgtctctactaaaaataccaaaattagccaggcgtggtggcgcacacctgtaatcccagcactttgggaggctgaggcaggtggatcattcaaggtcaggagtttgagacacctggacaatatggtgaaaccccatctctaccaaatatacaaaaattaaccaggcgtggcggcacacgcctgtagtcccagctactcgggaggctgaggcatgagaattgtttgaactcaggaggtagaggttgcagtgaacagagattttgccactgaactccagcctggatgacagagcaagactcagtctcaaaaaataataataataaaagtaccaccagaatgtggctgtactgtcaggggtgcatccccagctgcactcctgcggtcactgtgagtccctgaacggcaccaatgggccggtagcgcatccagcaacgccctgatcatggccacgcacagggacgcacatgctttcacgaacgcacaccacacatgtggacacacacactgtcgcacacagacacgtactgacatatgctcttacacacaattcacacacgagcacacacacacacacgctgacaccccacgtacatacccacgtggttgtttgtttatgccagtgatgaaaactcaggaacactaaggcagggctggtgttgctttttttttttttttttgagacagagtcttgctcttgctcttgtcacccaggctggagtgcaacggtgcaatctcggctcactgcaacctccgcctctcaggttcaagcgattctcctgcctcagcctcctgagtagctgggattacaggcatgcacccccacacccggctaatttttttatttttagcagagacggggtttcgccatgttggccaggctctctcgaactcttgacctcatgacccacctgccttggcctcctaagatgttgcctttcttaagtgacatagaccatgtggaaaaaccgggttacctgtggttagtgactaacaataaaacaggaaaggttatatccatcacacaaatgtctgagggggagagaatgtgacaaggaataaaattggatcaaattctgcaaaagtaactgggattctgggaagaagccgtggcctcaggctgactcgcccccggggcttgacttgggctaagctcgaggtgagtccacgtccccgggccccactggggctgggtacactggggacagccgccgggctctgtcctcccaaacttgccccttgcccagtcctcttagggggacaacgtgccatcgaggggaccatgcctccgcctgtgtcctgaacgctgggaggctgaggccccaggatttctcttgaccccagtggcacgggggactcctggcttcaccagccctatgaaccaggtgaaggtgaggccatagacaagggaggatgggggagggaagagggacatagagaccaagactcagagggcgtagctgctggagcaggccgagggcaaatctgttctgacataacgttgagacaaatgccatttctaggaaaggatactctgctgtctcctctgcgtatctcacaggcactcaggtctaacatgttccaagcgtgctccttgcgcgtcctgtccacccgtggtccctgctgagtcctctgagtgcagcaaacagcccctcaggcttcagtggctcaggccccaaacctcggatctgcccttccctcacccaaggacgtcctatctgctgcctgcacatctggttcagaatcaagccctcctaccgctgccaaggtcaggccagggttgtgcccatctctccccatctccccaggcctcctgccctctcctccctcttcttcaagccatcctgagcccaggccagcgagcctggtaaaatgtcatcccccatgatccctcagcttagcaccctcccgtggccactcagagtgaaagccagggtccttcctcacctccacccccttgactctccatgctcacctccccggtctcccctcccctctcactctgcccctcatgagtcccatcacaggcaggaagttctgccttcccagcacctgccaccgagccaggtacacagcaggtgctcaatcaatcctctcaccggcagctgcttctccaggcagatgctgaaggtcttggtgtggttgggtttcagcttcttcaggggcacacgtgtctccccgatgaactcattgtgccggaatttgtcctcgtcacacacagagatcctagagggggcggtggtgaggggcacagccagtgcctcagacgcactgggcatggtggaggtgtgcgcaggtagggccagccctggcttctcctgccccaagccctgccctggtctggggtgggagacgcacaagatgcctgggccctgacaggggcagagtgtggcacgatatcaggcactgtcctcatggacaagtgtcctcaggttggaagaggggacaggagaaggcagaaccagtgccaggagtagccaggaggctgggagagccggttctctggagggaaccacctccagcaccctgagaggccccaggaagcaccttcaggggactggggccagggtgacccttttccacccaccaggctccattggcgtgggcagacctttctgcctttcttcaagcccccaagctggagttgctggcatgaggttgaacccacaggggaccatctgaccctccagtcctgccttcattaggaaaagccgggtgggagtaggggttggggagggagcaggcggcctgggaccctcacccaccgcagggtcttgcggatcatgtcttcatctgtgatcccgtagtaagtgagggtctcgttccatgtggggttcagagtgttacggagagtttttgttctgagcttatttgcctggagaagagaaaaatgatcttattagcatcaaagtgtgtatcaaacagaacaatggcccccagagatggccacgtgctcatcttggagcctgtgaatgtgttatcaacatggccaagtggactgaggctgcaggtggacttagggttggtaatgagctgacattagaatagggagattatcctagattgttgggtggcccaatgtggtcacagggttcttaaaagcagaagaatggacagagaagacagtcagggacgtcaccaaggaagggggccagagagatgcaatggggcccgctgtgaaggtggaggaaggggccacaagcccaggagggccgatggcctctagaagctggaaggagctaggaaactgtgggctccccgggctccagaaggaatgcagccttgccgacaccttgattttagcccagagagagaccactgctggacttctaacctgcagagcagtccgagagtaaacgcgctgctttaagccacgaagtttgtggtcatttgttgcagcagccgtaggaggctcatccaaggaggaccccacctccagcccgatgccacggggtaggttctgcaggaggcctgtgtggaactggagtctccttcccagggcattccctgcctttgtggaccgtcccctctgcctggaacccatcccgtccttgggtctgcctcgggggtggcctctccgagctggaatattgctgccactccctcctcctgtgccagcggctctgagctccttgtctgaatcggtctgatgcctgccacacccggcccaggctgggaggtcagacagcctgggcttccaattccagctctgtggcagcatcaggttccccactgtggaaagggcacaggaatccctctctcccattgctttcaggagctgtttgtaaggagactgctctttataaaacactagggaaagtcctggggacttcctacaactcggcagccatgcactgccggctccagtcccacaaatgaagggtcactgagcacacttccctggtcatactcgccctcggccctcatatccctgagcccttcttgcagcataagggcatcaagaccctgtgtggggagcccatttcttccccaggagtaggtggtggggcactgccatttctcctacagtcctgccttccctagagaagggggaagggccccttctggggtggtcctcctgggctgctgtgggccccaggcctacccatttaggcctccacgtaaactcagactctgccccatgaaattaaaaataaaacagcactgaagtgtaggatgcacagaaggaagtctaattaagttctgactttccatggctcaaggtcaccttgatgcttttatttaacagcaatttttctctctcctgtccgagatgcacctgttgtgctggtgccctgagcacatgtgtggtcggacgcttgggtcatccggcgtaggaatgaggggcagattctgcccacttcatcccccttgcggagagtcagggaacagcccatcaacacgttagatgctctgagaagtcctgtggtacagaaacctgtttaacaatgtttccccatgttatttaaccacagagtcctttgtttgcacctaatagtaacttccagctgagaatgcttcttataaaatgctggcctggaaattctccaggggtttccccagatcagcaggtaggtaacgctgactcgtgaggtccccaggaggcaacagggtgtggggcagactgggtgctctgtgtgcagttgaatggctgaggtcccatcagcttgcttggactctgaggggagtggcagctgtgggcctccctgggtgcccgcagcccagtccaggccccaaagcaaaaggaccagagtgcattgcctgaggtggtgggcgggtgcagctggtgggcaggcctgggtggaacccctcaccttactggctcctggcagcaggtgcagcttgacgtaggggtctgccagcccattgtggtccattggcttcaggccctgggcagagaagagcaaacggtgtgaactggaaatcggggacatggaactgacagggcctgcagatgcccttgtcccctgggtctcctggctgggcccattcatggcccctttcacagaagcccccgggccccacacctccagatggagggagtgaggatggctcaacgctgatgcaatctcccctccccaaaacatcctggcccagggcagctgtcatggggcctctgtcaggacagactttctcttgtcctcatcctggaagccaggtggctcccccttctctgagcctccctctccaccctgctttgctcaggccctgccatcatcctgactcccgtctcccatctaccaagcgtggcctcctgagtggccatgcccctcactgaccctaaatccacataaccccgggacacagtctgagactaggccccatttctggccatatttgccacaactcccagtcagtccacagagatcacacaagcagactggccacagagggtccctccacaagatggcacccctctctcactctggttctttcagaaaacccagccacgcgtgcacagccagaggcacacagaagcatggacagagaggggctttgctgacctcagcaggctcttgtctctgaaaattgcatttgtttccttctgggatggtgcacagggatgcagggaggcagctgtggcatctgtgggggtgcagccggcaaccccaggatagtattcaaagggcttctacccagccgggtcagggaggcagctcggcggctcacaccaggcccatctccaaggggaggctggggctccctcccaggcccaccccacctcggtttgacggagctctgggggatgcggcaggggcttccaaccacctacttccctgccactggcaaagggcagaggtttgggggcctggctggcttgggctccaggctcagctcctgttcaccagctgggaagtggatgagttactttgcacgctaagcctcagctttatcatctgttaaaggggttggccgggcacggtggctcacgcctgtaatcccagcgcttgagcccaggagttcaagaccagcctgggcaacacagtaagaccctgtctcttcaaaaaactaaaaaattagctgggtggggtggcatgtgcctgtggttccagcaactagagaagctgaggtgggaggatcgcttgaacctgggacacggaggctgcagtgaaccatgatcgcaccactgcactccagcctgggtgacagagtgagaccctgtctcaagtttaaaaaaaaaaaaaaaaaaagggcgggggtgtaatactcccaccttcctagggctggagtgagagggagggagactgtgtggacacagggcctggcaggcagggtttgctcccttccctgcacgccaggcccccgtgagacgccggagaagcggttgaggtctgctgggtgcatctgagctgtgccctgcactgtggggctgcctctgggacagggcctggctcagtggcccaacacgtgctcaaggtgacaaggctgctcttccaaacccaactccctcaccctgccttgcacctttcccaccaagtgcctgaagtgcagagttctgggaatctggtggcctggcctgaccaggcggtgcctgactgctgtgtcttattcttacagtccttatacatttgtttgttgtagcttaaaatgtttccatttgggccacgtttcctgacacgtttcacttacaaacctttgggccaccacatgttctggcgtatgtctttccagtggctctggtggtcccacctccgtaccccgagacacccgtgggagctaggctgggtcgaggggcgctgtcatgctgggacgggagtgatgcctgctctgtccttcagaccccgggactgtgacgaggcccctgctgctgctctctactcctccacccggcagttccctgagcaccctgggcagccacacatttcgccaaaagcaaaaggaccagcaggcactgcctgaagccctgtcactgtgctgccaccaacttctgtgcccaaacaggcagcttccctggtcctgacccggggttccgccagtgcctccaccttctgtggggctggcctcccacggagcctgacctctgtccacggaaggggaaggtcgggaggctgtttccagggcagggagctgctagtggggcccttgggcacatgctccccagcttgggagttggcaagagacataaactgatcccatggtttaggggtgggcctcacgggaggtgacgtggtttggcggtgtccccacccaagtctcatctggagttgtactcccataattcctacaggttgtgggaaggacccagcgggagataactgaatcacaaggggaggtttctcccagactgttcttgacgtagtgaatacgtctcacgagatctgatgatctgacactgttcttgaggtagtgaatacgtctcacgagatctcatggtctgacactcttcttgacgtagtgaatacgtctcacgagatctcatggtctgacactgttcttgaggtagtgaatacgtctcacgagatctcatggtctgacactgttcttgaggtagtgaatacgtctcacgagatctcatggtctgacactgttcttgaggtagtgaatacgtctcacgagatctcatggtctgacactgttcttgaggtagtgaatacgtctcacgagatctcatggtctgacactcttcttgaggtagtgaatacgtctcacgagatctcatggtctgacactcttcttgaggtagtgaatacgtctcacgagatctcatggtctgacactcttcttgaggtagtgaatacgtctcacgagatctcatggtctgacactcttcttgaggtagtgaatacgtctcacgagatctcatggtctgacactgttcttgaggtagtgaatacgtctcacgagatctgatggtctgacactgttcttgaggtagtgaatacgtctcacgagatctcatggtctgacactgttcttgaggtagtgaatacgtctcacgagatctcatggtctgacactgttcttgaggtagtgaatacgtctcacgagatctcatggtctgacactgttcttgaggtagtgaatacgtctcacgagatctcatggtctgacactgttcttgaggtagtgaatacgtctcacgagatctcatggtctgacactgttcttgaggtagtgaatacgtctcacgagatctcatggtctgacactcttcttgaggtagtgaatacgtctcacgagatctcatggtctgacactcttcttgaggtagtgaatacgtctcacgagatctcatggtctgacactcttcttgaggtagtgaatacgtctcacgagatctcatggtctgacactgttcttgaggtagtgaatacgtctcacgagatctgatggtctgacactgttcttgaggtagtgaatacgtctcacgagatctcatggtctgacactgttcttgaggtagtgaatacgtctcacgagatctcatggtctgacactgttcttgaggtagtgaatacgtctcacgagatctcatggtctgacactgttcttgaggtagtgaatacgtctcacgagatctcatggtctgacactgttcttgaggtagtgaatacgtctcacgagatctcatggtctgacactgttcttgaggtagtgaatacgtctcacgagatctcatggtctgacactgttcttgaggtagtgaatacgtctcacgagatctcatggtctgacactgttcttgaggtagtgaatacgtctcacgagatctcatggtctgacactgttcttgaggtagtgaatacgtctcacgagatctcatggtctgacactcttcttgaggtagtgaatacgtctcacgagatctcatggtctgacactcttcttgaggtagtgaatacgtctcacgagatctcatggtctgacactgttcttgaggtagtgaatacgtctcacgagatctgatggtctgacactgttcttgaggtagtgaatacgtctcacgagatctcatggtctgacactgttcttgaggtagtgaatacgtctcacgagatctcatggtctgacactgttcttgaggtagtgaatacgtctcacgagatctcatggtctgacactgttcttgaggtagtgaatacgtctcacgagatctcatggtctgacactgttcttgaggtagtgaatacgtctcacgagatctcatggtctgacactgttcttgaggtagtgaatacgtctcacgagatctcatggtctgacactgttcttgaggtagtgaatacgtctcacgagatctcatggtctgacactgttcttgaggtagtgaatacgtctcacgagatctcatggtctgacactgttcttgaggtagtgaatacgtctcacgagatctcatggtctgacactgttcttgaggtagtgaatacgtctcacgagatctcatggtctgacactcttcttgaggtagtgaatacatctcacgagatctgatggcctgataaggggaaacccgttttccttggctctcattctctctcttgccaccaaacatgtgagaagtgcctttcactttcagccataactgtgaggtcttctcagccacgtgtaacggcaagtccaataaacctctttcctttataaattacacagtctcaggtatgtctttatcggcagcatgaaaatggactaatacagggaggatgggtggaagcggccccgggggaggccctggctggtactggcactgagggaagagatggggggtctggctttgagaggagagcttctccccaaaaacctagccctgccccgccctgggcctctcagaggctgttgctggtgaagtgttcggaagaggagctttctagtctgaagtatcattcagcctgaaaaggaagttttgacacgtgctgcaatggggatgaagcctgaagacattctgcggagtgaaagaaggcagactcaaaaggacagatcccggggactgcagactcaaaaggacagataccgggagactgcacttacatgaggtccctagaatagtcaaatccatagagaaggaagccaaatggcagcctccccaggggccaggggaggaggaagggggagctgttgtttaatgggtccagtttagttttgcaagctgaagagggctctggagatgggtttcacagcagtgtgaaggtagaaggtacttagcacaactgaactgtacgctaaaaatggttgagcgctgagggaagaagtaaaaaaaagtggttgaggtgggaaatgtatatctgtgtattttaccacaataaaaataaaaagtctcccagaactggtagtgccaggggccacgtgttaactcatttaatgctcacaacaggcatgtagggcagggacaaccaaccctatttacagatgggcaaactgagactgacccttataaggggggacaagcaagggtgcaccccagggtgtccagcccccaccctggccctccagaggccagccctccttcagctcacccaccctgggcccctccccacaccccagcccagagccccagctcttccccagcctgcaccaccccttccctacagaactggatttacacagagaaggaactgggcctcccacccccacttctgatacctgagggatacagcccaaagtggacacacacttacatgtgtgcacgcacggtaccacacatgtacacacagagacacacatacagccatgtatgtgcatacacacaaacgcacctggagctgggaagggaaggccctggtgtctggcatggagagaggaaggggtgggctttggccagagtggcctggcagccggcacctctccagtccccaggcctggaccacctctacaaagttggacagagggaaaggaggaagggtctagcttggtctctaccttggcacagctgggatttgacaaatgctcagttctgctcctaggggtgggctggagcccccgccaggcagggctggacatgccctgagtcatagcatgggtggttctagagagggcaggggtgggatggagcgtgcaggcctctcagtgccctaccagggccctgaggcttgcgtggatggcactcacacctacccatggcagtccacatgtggcccaggctgggctgggggacagcctggggtggcacgcagtagcctgtcctgctgggtgagcatgctgccaagggcagcccttgctgccaggctgggaggaggggcagggggcctgcaggttgggaggctgggtggggcctgggcccaggcagctctgtgggaagccgctggatctgagctgggctggctcaggcccttacatggcactactagggagactctactggccatgcaggcccttaccttgcgagagaacatcaattttggcaccttcctcccacagggagcaatggggtgaggggaagggaacaggacagttgagaacatggagctgacacatgcttgagtggcagagccagagggcagcaccagggaccaggccaggctgcagaggggagcaccaggggccgggccaggctgcagagggcagcaccaggggccgggccaggctgcagagggcagcaccaggggccgggccaggctgcagaggggagcaccaggggccgggccaggctgcagagggcagcaccaggggccgggccaggctgcagagggcagcaccaggggccgggccaggctgcagaggggagagcaccaggggccgggccaggctgcagaggggagagcaccaggggccgggccaggctgcagaggggagcaccaggggccgggccaggctgcagagggcagcaccaggggccgggccaggctgcagaggggagcaccaggggccgggccaggctgcagaggggagcaccaggggccgggccaggctgcagaggggagagcaccaggggccgggccaggctgcagaggggagagcaccaggggccgggccaggctgcagaggggagagcaccaggggccgggccaggctgcagagggcggcaccaggggccgggccaggttgcagaggggagcaccaggggccgggccaggctgcagaggggagcaccaggggccgggccaggctgcagagggcagcaccaggggccgggccaggctgcagaggggagagcaccaggggccgggccaggctgcagaggggagcaccaggggccgggccaggctgcagagggcagcaccaggggccgggccaggctgcagaggggagagcaccaggggccgggccaggctgcagaggggagcaccaggggccgggccaggctgcagaggggagcaccaggggccgggccaggctgcagaggggagagcaccaggggccgggccaggctgcagaggggagcaccaggggccgggccaggctgcagagggcagcaccaggggccgggccaggctgcagaggggagcaccaggggccgggccaggctgcagagggcagcaccaggggccgggccaggctgcagaggggagagcaccaggggccgggccaggctgcagaggggagcaccaggggccgggccaggctgcagagggcagcaccaggggccgggccaggctgcagaggggagagcaccaggggccgggccaggctgcagaggggagcaccaggggccgggccaggctgcagaggggagcaccaggggccgggccaggctgcagaggggagcaccaggggccgggccaggctgcagaggggagcaccagcggccgggccaggctgcagaggggtccacaggcacccacaaccccagcccacgtagtgaggctcagagggcctctgggctcaggccgtggacaccctgcctggagtggcatcggcctcctacagtggctcggcttccagggtgcaaagtggcgtccccactcctcagggcgtctgggaggcctggaggcaccagtacccaacccgccctcccttggcctgcaggacagacatcaccctgcccctctctttccctctcagcagcccctccccaggctcgagggtcctcggtccaggccttcatcttcccattctcatctgtttctttgctccccgcaatgcctgactgtccaaggcatttcttggggttgggtattcaagaaggtttaaagaagaattccttcctggccccgcaccccacacagcgcagacatccaaaagcctggacaggaacctggggagtggtgtggtctggcctccctgacctaggccctcttgaggaccccggggcagggaatttgggggcaggctggcggggcctaccttggccttggtgatggtgcagtggagggcgttgttctcctggtcatacagcaggctgaagtccagcgtgcccagggcagctgcggacagaggagggcacaggtcccaccctggccgcatcttggagaggcttcgcctgcccctgtgagaccagatgagcctggcctgggcaggtgccaccgttccatggcggctgccaccaaccaagcacctgctctatgccagcccctcacccatcctcccagtcccacccaaccctgggaagtcacaataatctccccactttccagaggaggagctgagacccagagaggtcaggtgggtcactccagttccctgtctggcccagtgtgtggtccacctgagctgggcacccagccaaaggagttcctgccctcctggtgcaactgccagtctgggccccgtgcctcagtttccctcacctgtgaaatgtcacaaggatcacacaaggcggaggagacgaggctttgagaggaacaggtcctggccaggaagatcagctgatttgctcaacagtcccccagccaacacacaggactgcagctcctctgtctctctggcccgttgggaaccccgagcaggccgtgaggagccagctgggtcctcatactgctgcccccaagtctctcaatggcagtggtaactcccaaaagccggggggagggtgcagccataattgggggaggttgcagccataattgggtgcagctgcctccctccccgggggcaatcactcatagcagctgtggctttccatgcagaagcggctcccagcatggaggccaaggtgatggttggggcagagcttggagatgatggtggggggcagagcttagtggcagtccgcagacagcaagatgcacattcacagatggcttcagaagcccagagcctgctcccaggctgcagggctggtcaaatggtgtcacattccttcattatttaccaagtgtttacaacatgccagactctaggggatggacatctgtgaggcagagtccctatcccaaggaaagcacagcttaaggggaggaacaaatggaaataatttgccgcagtagagtctggtgagccgggagccatggggagcccatgtgaattgggaccaccagggaaggcttcctggaggaggtgatgcttcacctgagccatgagggatgagtaggagttggccaatggcaaagaggggctgggggaggtgacgattccaaccacaggccaaccagcaggtacgggcttagtggctggtgtgatcccgggataagggaaggccaaacttgaaagactgtgttcttcaggctctgagctaggctcccaacctggatctagatccaattacggccacacctgaccaggcccatcatttacatctcttctgcggctgctttcctacttcagaagcagaccctacggcctgcacagctgaaaatatttactatccagcccttctttatagaacaagtttgcagatctctgggcgagtgctgggcccaggcataacaaagtttcttgggtctgcagggaaattggctaatgaaaggccacgagtgtggagtgtcctttattctgagctggtgatgggagtggcatttgtctagatcatccccttctaacacgggtcaggcacatgtctctgtcttcgcagcagtgtggggtgcaagacctgccctctgacatcagtctcctcggttcaaatcccagcgtgcacttccctgctgtgtggccagcttatctaacgtctttatgcctcagtttactcatctgtgaaatggagacaacgatagtatccacctcacagcacagtgtgcctgcggtgtaggaggtgctcagtagatcattatagaaggagcagatccctatggtgggttttctagctaacagtactggcttctctaagacccattctggaatgaaactgtcctcaattggctcatttccctccctgcctttgggaacagaacatacaaatagtcacttaaattttttgaataacctgagtcattgctatggccacgatgactcttccgtatgtcacggtcatgttccagaggcaaaaggggacacgaagcaacccctgcaccagagggtcccgggtggccctcttttcggttttcttcatttttctgcctcttcctttgacatcagcctgaaactcctattagattacttgtctgtgttggcgcagacagctctcacctattcaataattgtttctcccatgagaccaggtgatgatacttgttggaagtgtgtgcaaactaagagccaacaggccttgagtggctggtgtggggctcatgcctgtcatcccagcagtttgggaggccgaagcagatggatcacttgagctcaggagttcgagaccagcctggccaacatggcaacaaaaactacaaaaatggccgggtgtggtggctcacgcctataatcccagcactttgggaggctgagacgggtggatcacttgagcccaggatttcaagaccggcctggccaacatggaaacacccatttctacaaaaaatacaaaaatagccgggcatggtggcgcatgcctgtggtcccagctactcgggaggctgaggtgggaggaccgcttgagcccaggaagttgaggctacagtgagtgtgattgtgccactgcatccaacctaggcgacagagcgagatcctgtctcaaaaaaataaataaatactaggtcttgagtgaagcctgaggcacgttctcctgagcagggtatgtgtgcagcagcaatagctgtagctggccttcagctgcctgcatgctagctgccatctccacaccaggcaggtgaggctgctggaagggaggtgtatcccactgctcctgcagcaatgaacacagccacagcccgagatgcaccaatctgtacttttgtaacaatattctctgaagctgttggctttacatgatagtaaatggatctgctgttcaggtcaggcctacctggggtttgttcccccaacgaattagccccctgagcacagggaccatgccttggccacacctgtgagaccaacaaacagcagatgcagacacacatggctggtccattcaaaccaacttgccctccaggtgctcccaggagctgggatctggtgtgacacccaagtgtaaaaatgcacattctgatttctgcctgtttcccaaccccagagaaggacagccagaagacagagcggctgcctgctccccctgggacacccagctcctggaggggagaagcccctgcactggctctacagaaacccctgtccaaggagggcagcgatcttctccaactgcctggggggaaaactgacacccgtcaccacctcctgggaaggaacagcacacccagtgtgtcaccaggaagggactgatgaatttctttgaactccactggaaggtctgtaagaaatgatagtttataaatagaagctcggtcacagttttgagaggctggtgaagctctcttacggagcacatggcccaaactcttcatttccctttagagaaatgaggctcagagaggggaggggagctgctcagcgtggcccagcagacccaggcacagaatctaggcctcttcacttccatcctgatagtttctcccttaaagcctactggctcccaagaagttttttttttttgagacagggtcttgttctgttacccaggctggagtacagtggtgcgatcacagttcagcctcccaggctcaaacgatcctctcacctcagcctcccaagtagctgggactacaggcgcccaccaccatgcccggctaacttaaaaaatatatttacaaaaaaagagacagtggtgttggtgcggggggtgcgggggggtaggtctcactacgttgctcaggctggtcttgaactcccgggctcaagcaatcctcccgccttcacctcccaaagtgctgggattacaggcacacacgggccactctgccctggtccaaaaagcttttttttggccactttgtttagctgaaatcttaggaggatgcaactaagaaacaaaaagagagaaaagcagagttgctctaggggaaggagagtgggggctcagccgctgccctggagagccctccgagttggaaaagcaccttgggcttgtgctgggcgtgaggagggccctaagggcaggagaaggtgcttctctgtgacccacagtgccctgcccttggagcgctccaatcacatgaccccactgaagtttacatcttcggaaaaataatgagggttggtcactaatgggcctttgagagttgtcacccgcttgtcgataattacagagctttaatggggctaattcagagaaaatcaagctcaagcccctgttggctcctctaaggccgagcaccccctgcttggctgatgtagacctgacagcatcatcataaccttggtttgcacctggactttcctgacacccttgggaataggaaatctgccctgattttttttttttttttttttaagaaaaatgtcaggctctcaaatactttaaaaaaaacaaaacaattgtggcaaggaccatagaaaatcatcaagcttgtgttgaaagcattttatagttggggaaacagccattcagccaggccggcactgcaggggggacagagagaaatgagccatcatccctgcttcccaggagcttagagacgagtgttaagatttttataaacatcttcattcatctgctttaaattgttgaaaggttctccatcaactcctggactcagttcaacctccttggtgtggcattcaagaccttgtgtgatatgaccactttggcctcctcataggtctcttccccttctttgagccacttggctctactgttttgcctacactgggctgagtttctgacacttcaggacctgtgtacacagctgtccctctgcgaagagcacctccctttcctcttttccctctgtcagcccacctcctccctcctcccagtcttagggctgagccctctctgtgagtgacctccgcctgccagagctttccatctgggttcttgcctccctgtccctcgctgtggggtcacctgtttgtcttggttttgatgaacaccctcaggtcagaggttgcctctcagcattcttgtatctctgtgcctaacacagagcctgccacatagttggtgccgtaacatcgagtgcattacaaatatcacaggtccaggtagaacatgactggggccaaagaggttctgggctcaaaggaaggggcaccacagcccatgggggctggaatatgccccctaacacggagaacctttgtggtggactcaaccccttgtccttgctccagacctgcacaggcatcggtcctgacccggtcctgggtgaaccacacagggcaggtttaacacgggcatgtgatccaattctggccaatgagacaaaaggacaggtctcctggggacttctgggagaggtttcctcgctcttaaactgagacatgagaaaaggaatcggtccttaccaattccttacccagtcaaggaccttattgttacatgtgatgcctggacctgcagcagccaccttggacctgagggtcctgcttggctgatggagactgacagcgtcattctgactttggtctgcacctgaaccttcctcacccagacacccttaggaataggaaacgggccttgattttgctctacaaggaaaaacgcacagccacgagcaaagatggacagaaccatcaccccaacagtgctgaggggctgctgcattggtgcaccctggtgcagcaagacctcagctgtcctcattgtttaagccactctgagttggttatctgtcacttgcaacccatggcactctagtgattacagctttgaagaatggactgggcttccacaggtgggtgccgggcaggagagcctctcaggtaggggcagcgtgtggggtgtgtggcccacggcccacctggagggcagcacgccacagaggccaccctaggagaactggcagggccgacactgggtcctgctcctcattgggacattcactgcctttcctccctgtcatcgcccctcttcgagatctgctgggaacatgcgagttatgtgcttgtgctttgacatgacttaataaagaaagggctttaaaaagccaggagaaaaggctgagtaaataaacagcacttcactctctgccttggacaacagagcaaccgccctcatttctttttgtcagaacagagataatccaataattagggcagcaaatagcataaccctggctaaagccgtaatgaaccatctggcttgaatcattgaggcttattctaaggatctggttgtcacagcccagaggggggcaccgcctggggtactgggtggaaggcagtcccaccccagaacctgttcccccaccatggacaagagccaagatttctgggcttctgggcctaggatgtttgtcagcctcccataggatccaagcctagggtggggcccccctcgaagggggcgacaggggcccaagctggccctagctcagtggcacaccgtcctccttagctcctctgagcccgtcttcagcatttctttggcatgtcctgataatacgggtgtggccagcccacagttcaagctggcaaagctgcatccagctctgccctgcactgctgacctcatgtgagtctggcccctgcaccgcatgtatctcaggccaggggcccagccctgctgccaggacatgctccctgaagggctgctgagctgatggattggagatggggctggctggcctgagtttctagcttcctggtcccctccttgctttgtgggttcagagacagcaaaaaaaagaaaaagaaaaagcctcttggccattcgccatgcagagggccctctgtggcaccaggagggtggcctgaagctctgccctcccctcttacttccttggtgcagcagcagagatgccagaaatgggaacaactttcccatccgttcttctgggggaggctttggattcagggcagccaaagcagttacttgggtcccactcagggcccacccaggggatcaccaagtccagggtgagcttcgcacagggtgccaggggcagaggggagggggggtggatctagggcacagccctgagggcaaaaaactcttccgacccaatctccccaagctggcaggaaagtggagggacaagactgctccccagcccccacgccccagggcagggccttcatgtgccaggcgctggcccgagggccgtggtccaggcctctagaaagtgcaaagcaggcagtttcccctacaggggccctgctctaaccggccactgctgatgggcctccccaggtggggcgatggggggtctgtgccccgggggcactggtaatccctaccttcagcttctggtggcacatttgatgcttgggaaactccaggcccgcagcccacaggccctggtgagtgcccaggccaggcgcagacatccctgctgcgcaggggaggggcagcaccagccctggagaagggccacatcccgggaagggctggggtttgacgagacgctggttttccaggtctcagtgacaagtctggagccacagctgagctaggagggggttctcacatgccatccccaccccgcgcaaaccgactcctcactggactgcgacctcttccggcctcggtttcccagccagtcccggctcgggccggacaggcaccctcggggacgggaaaaggcgccaggagcgcccaccggccgggcctcggtcccgggactccggcgcttgcctgctcccgggggctcagggctcagtccgggaggagggggagcgggctggggggccctctctgcccgggggccgcgggcgtaacaggtgggcgaaggtgcgcggccctggcgagggctgcggcggggtccatggacaccggaggaggaaacgccaaggtttttccaaaggacaagcggccccgcggtcctcctggtcctctgctcgcgcgccagcaaagcagctgcgctctgcgggccgccgggaccacgcgggaggccgggccgctcccagcctcgggcccctccccagctcgccccagccccgaccctcggccgcgaggccctcccggagcggctggcgagcggggagcgaccgcgcggccggcagcaactggtgtctccccgggacgcagctccgcccttcccgggaacaaaagcagccgcccgcgccggagctccgggagggcgggctggcagggagggggcgcggcgccggctccgaggaacccggccccggaaatgggacacccccagggggtgcccccgaacttccctcctgtccggcctgggtcgggggagggctcgaggccggtgggcagggcgcggagagcgcaccgagtgcgccaggggcccgcaagcccgcggcggggttgtgaaccgaggcagagcgcgagcgcgcgagggggaccggcggagggaagccgcgaggccgtgggggggccgagcccgagccaggggagggggcgcgaagtcggcgcgtgggaaacttactgcagtcgtccgactcgtagccgtcggcgtccggctcgtcctccggcggcttggctggcggccgcgcggggctgggacccgggctggggcccgggctggagccgtaggctccgaagagctggtccacatcctcgtcgtcctcgcgggcgccgtcggaggggctgcggcggccggcaccggccacagccgggcgcgcgggggcgtccgggggtgcagcggctcggggcccggcgtccgggggcaggccccgcgggaagcgggggaagtagtcggagatctgcttgatgggacggatggggccggggcacacgtcgatggccatatgctcctggatgctgatggtcgccttctccccgcgccgccggagggtcatgcaggcagcgccgccccgccccgggcgcggcccggcccggcgcgaccccggcccgggggcggctcagcaggcccggcggggcgcggcgggggctgcgggcatcgccggccgcgcccccggacggccctgacttggccgctgcccgctccgctgcggacggcgcgagcgagtgccagaggccggcaggcagggggcgggcccagcccgcgtcacccggcagcaaccaagcagggtgagtgtgcgggctgcgcgggcggcgcggagcggagggagccgcgcggcgccacactcactcgcactcgcactcacaccggcgtgcacgccggcccgggaccccgcgcgcgcacactcgcggccaggcagggccgccgggcgccttccgctcatgcacgcccgcggcacaagctgggagtcaacccggcagggacccgcaggacgcgcacccacacgttcccgcgcgtgccagcccacgctgggctccgctcgctctctcgggacacacgcaggtgtgcaagtgcacacatgcgtgtgcagagacacgtggtggaagcatccgctcgctcacaccgtaggtcacacacgcaaacgtctgcatgcgcacatggttgttttaggaagctgtgacacagtacacccccaatgcacaggcgcgcacacctgatggagcacacacacaggtgatcaagggcacccagggcacaggcttccctacccccaagcacccctaacaagatgcacaaacatgagcccatagaagtgatcaggggaccctgggcacaactccttctctcctccccctctagcaggacgtggagtcacactcctagcatgtagggacaggttgcctacacacgggcaggacatgtacacgctcaactgcacaaggacaccggggctcagtctgtgcacacatattctcaggtcacatacaacacagcactctaacctcgggtcagtccctcacttggtcagtgagtacagtctgaaggaccccccggggcagggtggctgagaacctgcacagggcctggtcaggagggagtgagggcagggcctgggcggtgagtgatgcaataaggctgggcggcacgctccccccacccccactcctactctaggcctcccacacggtcagatcactaaacaaatcccagagggcccagccctggctgtccggctttccgggaccagagctctgttgggaactgctgctgcttggacaggtgtgttcccggaaagccctgggcatggatggaatcctgtttaccctctggtttccactgatgtgtaagacacttagcttcttagtgggtgcctttggtgcatctgaatgaggggctccaagcctctcttgttcccccaccataacccctgcagagtgatggggagcagaggaaagagaggcaaagccttggcctgtggcttccagctgcacagttctggcaggctatttgacctctttgagcctcggtttcctcatctatgaagtgaggctatttccaactgcacagccttgtggcaaggccccatccagcacagacaggtaagaggtgctcagctggctttcccttctcccttcctttggaaagacaagactcatggtgagaagtgatgagaaattcatgttttgtggtgagttctgaactgggtggtggcgggcactaccggcctttgaaaacactggagaaacacatggcatatgttgtactgcgccaagaacattcacagctgtcatctcattgattccttaaaccaccccacgatgtaggcagggcctgctgttcccatttcacaggggaggaaattagcgctcaggcacaaggatgtgtccagggtgactgctggctggcggcagagctgcgatgagagcccagtgtcctgactgttcgatgcttccactttccctcccttctccctttcctcccctccactacagagctcaggggctcagagcagagttggaaacacaggtaaaacctcgttcccaaagctcatcctgaggcttcttggacaggggaagcccaaactgaggaggaggggaaggagggaaaaaaaggaggaggaagaggaggacgggaggaggccaagagcctcaggggttacagtgggaatgaaccagccggggttccctaaagatagtctgaggtcctggtgggagaaatattcagccttccaagagccaaaggccaaggaaaggacagaagagcctggaagggcagcctggcacagaggggttctcatttccaggaatgcttaaggggattaatccttaaataggcacagggtgactttttctgtgccagaggtggctgcatcacaaaatgattacataatgacgcaggtattaaaatacagacgctgaactgtcattttatcattcctttactaaggagctggagggtgtcgtcatcatcttacagatggggaaactgaggctgcgggaggtcaagtgactagcaagaggcagactggagatgagacctggacgtcctgactgctgagcctgccaaggccctgtacctgtgttcaccgagagctggccgctctctcctggcctcttgtcctatgggtctggtttttggaggatcggctcatggctcttggctctgcaggagctggctcttggggagggctttgaagaagtcaggtggagggcccagcctcctaagcatggagccagggaacccaaggatgcccactggagaaacacatggcatgttggggtctaccctttggcaggtggcagagttgaaatccactctaggtctgaatttgcccagctctgagcccagctgaaatggggtagggcctccccgagggatagaagtggatagaagtggtgttatctgggcaagtgtccactttctagaaagagcataggtcagggagtaggcagacgtagagtcaaaagtcaggtgtgcctcctcctaagcgtaccggactttgggcaagttgtttaacttaggccctgggtctcatctgcaatgggggagaataagaacaacgttgtgtgagttaaaggtgaggatgggtatacagtgcttagcacagtgcccagtgtgcaactggcactcagggaattgtgattctgttgcccctgccttcctggtgcaaaccgtcccattgcaaatcttcctggtgcaaaccgtcgtggtgcaaaccttcctggtgcaaatcgtcgtggtgcaaaccttcctggtgcaaaccgtcccagtgcaaaacttcctggtgcaaatcgtcctggtgcaaaccttcctgatgcaaactgtcattgcgctcccagtgcctgccttgatttctctaccagtgacatgtggttggctgctccctgtctgctgccaggaccaggtgagaaatggatgcacttgccaaggctgggcgctggctggcatgtgtgggcatctctaagcagttggatatgtccaaaggctcatcaatcatgttgccttccattccccatgctgaggtgggcagctgggcagctggaccagcctctggcaaagttaagtggatggagtctgcccttggtcacagtcctcagaagccctgtgcccttgcctctctgccttctgcttttcccaacaagcttctgagctttctcccaactccccacagaccctctcaaaggctcctcctgtcaagtgagatacagtgggttctttaaaaaatggtccaggtatctgtagcactagcatgtctatttactttgtcactgaggctggagtgcagtggtgtgatcatggctcactgcaacctcgacctcccgaggctcaagtgatcttcccaactcagcctctcaagtatctgggaccaaatgcatgcaccaccatccccagctaatttttaaaatttttgtagagacggggtcttgccatgttaccctggctagtctcaaactcctggctttaaatgattttcctgccctggcctctcaaaatgctgagattacaagcgtgagttgccacacccagcccaggatgtctatcaataatgcagattccaggcccccatctcacacccactgactcagaatatgtgtgtgcacactcaggatgcatcttaacaagcgcccctgatgattctggtgcacagtgaaggttgagactcgctgggttagagggtgctaatggtttaacggtgattttcaacctgctgggctgcctctatactgttcacatgtgtaacatatgcccatcagtgacatctctcaatatttaatgattcttcactggggaagtgagtgactaacccaaggcaggtgttggaatttccagagaggtttggcaaagccacagtggggagtctgatctcctcctgtttgggtattctgacctctttcccggtggagaagtgttgggagcaggccccccaaaatctagccataaactggccccaaaactggccataaacaaaacctctgcagcactgtgacatgttcataatggccctaacgcctccgctggaaggttgtgggtttaccggaatgagggcaaggaacacccggcccgcccaggacggaaaaccccttaaaggcgttcttaagccacaaacaataccgtgagtgatctgtgccttaagaacatgctcctgctgcagttaaccagcccaacctattcctttaattcagcccgtcccttcgtttcccataagggatacttttagttgatttaacatctatagaaacaatgccaatgactggcttgctgttagtaaatacgtgggtaaatctctgttccgggctctcagctctgaaggctgtgagacccctgatttcccactccacacctctatatttctgtgtgtgtgtctttaattcctctagcgccgctgggttagggtctccccgaccaagctggtctcggcagagaaggaccagttaatggctcttcttagcgtaggtaacgtgtgttgttgaggaaatgccctctgtgcagcacttggctggatgttccttggttggcatcttggctggtgtccatgtgcccggagaagaagggccctctctgacccaggcctaatatgtgtcccccgtttccacccttccctgataaccggaggagatcttgtcctgctgtgctaatagaacgttctctgtattaacagaaaattttaacccaacagaggtgcttggatggaggaaatccaaacaatgttgctggttgatggagaggggcattccaaggtctcttgtccattcatttattcatgaagccacatttcaacaaatatttattgtgcacctgccctgtaacaggccccgagctgtgatctgtagggggctcagtgataaatgaagcccatttttctttagattccagatgatggaggggaagtcaggaagggaggtaggaaccaccactctaggggtcccttgcctccttcttggcatacgctatggcctcggcatggagagcatgatggagcactgatgccagcaagtcagctcaacatttgcaatatagcgtgtggctgcttagaggccaacttgatatattaagtgatattaaaaatgcagcctatttctgataatttatgcgcattctcataaacacattacactcgtcacagtacatttacgagcaccaggcctaccagtggggaaaagttaacacctacctaatgatgttgttttgcagatgtcagatgctctggtgctgcagtgatgggctcaatggtgcaaagaaatgtgagtctttcttctatcctgggacaccagaaggctgcccagggctcggcagaagaaccaggctctctccctccacactgccaaggtctgtgctgtgggattggaaagaggccgggtgagaggctcccctgccaggagagacttagcccaggatcaggttgcctaaggcaagagattagatgtcacagagggataatgctgaatcctctggggaagctctagaaatgacctctgggagaaagaggggcagagcctgaggcttacatcacagcacagatcagcctccctcccacaggcctggggaccactagagcccagggtcttcatgactgaagtgaacatctcagcattatacatgaattagaatgagtagaaactctaactagcccagggctggtggaaacccagggccaacagccacaaatgttccctccaatcgctttgaattcatgatgcaattcaaaggaattaacaatgcaagtggtagctttcaatgataacgtgttccactttttgtgtttgagagagtctcactctgttgcccaggctgaagtgcaatggcacgatctcggttcactgccacctccacctcccgggttcaagcaattttcctgcctcagcctcctgagtagctgggactacaggtgactgccaccatgtttggcgggcgtagttctttgtatttttagtagagatggggtttcaccatgttggccacgctggtcttgaattcctgacctcaggtgatctgcccgcctcagtctcccaaagtgctgggattacaggtgtgaaccaccacacctggcaccccccgccttttttttttttttttttttttttttagagactggaccttgctttgtcacccaggctggaatgccatggagtgatcatggctcactgcagtcttgaactcctgggctcacgtgatcctcccatctcagcctcctcaatagccagaaccacagatatgcaccaccacgtccagttaatctttttatgttttattttttaaagatgggtcttgctatgttgcccaggcttacatgaactgagttttacatttactacaaatgtgtgtacctataaacaatatatggtattgttttgcaagctttaaaactttgtaaaaatggcatcatactatacataacctcattaaactcatttttggcttattattatttgtgaagttttttcctgtagatgcatctagctatagtttgtttttattgctgtctactgttccactatgtgaatacgccataatttatttctcttttctcctattgttgatcatttaagctggttcctatgcgtggctatcatcaacatgctgcaatggctattcctgtttcctggtctgtatatgggatttctttttttgagacagggtctcactctattgcccaggctaaagttcagtcgtaccatctcggctcaccacagcctcaacctccctgggctcaggcgatcctcccacctcagcctcccgagtagctgggactgcaggcacataccaccacatctggctaatttttataatttttgtagagaaagggtttgccaggttgcccaggctagtctgaaactcctgagctcaagtgatcctcccacctcagcctcgcaaagtgctgggattacaggcgtgtgccaccacacctggccagggagagtttctttaagagagtttcttggataggaaatttgctgggcctagggtctgtatatctttaccttgactagagagtgcctagctgctccccaaactggttagaaccacggccattctcaccaaccatctctaacagtgccagttcctccttgtccttgtcaacacttggtattgccagacttgaatttttgctagtctggtaggttttttttatgtttaattagttctccttgctaactagtgctacttcatttctgctgctaagggtgggcatgtgctgtcaatagataaatgcaacagattaaaaattgaagagcttccatcaataagggattggctaaatacagtatgcctcacctgtacaatagaatactgcacaatcattaacaaagatgagtgtgctgatatggaagagatattgatattctgatgtactaaatatcttttcatctcccagatttattgttacaaagcaagaggcataaaaagcatattccctttgtaaataaatgaaaagatatgtatacacatgcatatttgtatgtatatgcgcagaatacctctgaaagaatgaacaggaaactggtaaccacagttcatctgggaagagcactagaggacagggaaacttttttgctctgtgaattcttaccacgcatgtgtattagcctgttggaaaaaattagccctagaataggcaaattcgtagagactgaaagtagaatagaggttgccagaggttttggggtagagaatagggggtttttatttgatagatgcattttctgtttgagatgatgagagagttctgaaatggatagtggtgatggttgtacaacattgtgattgtacttaatgccactcaactgtacacttaaaagcggttgaaatgggctgggcacggtggctcacacctggaatcccagcgcttcgggaagccaaggtgggcagatcacctgaggtcaggagttcacgaccagcctgaccaacatggtgaaaccccgtctctactaaaaatacaaaaattagctgggcgtggtggtggtcgcctataatcccagctactcaggaggctgaggcaggagaattgcttgaacctgggaggtggaggttgcagtgagccaagatcacgccactgtactccagcctgggcaacagaagtgagacctcatctcaaaaaaaaaaaatgttgaaatggcctggcacaatggttcacacctgtaatcccagccctcagggatgccaaggcaagaggatcacttgagcccaggagtttgagaccagcctgggaaagatggtgagactctgtctctacaaaatgttttttaaaaattagctgggtgcagtggtgcacaccctgtggtcccagctgctggggaggctgaggtgggaggattgcttgagcctaggttgtggtcccagctgctggggaggctgaggcgggaggattgcttgagcctaggaggttgaggctgcagtgaatcatgttctcagcactgcactccagtctgggcaacacagtgagaccctgtctcaaaaaaaaaagaaggaaagaaagaaggaaggaaggaaagaaaagaaataaagaaagagaaagaagagaaagagaaagaaagagagaaaaagaagaaagaagaaaaagaaagaaagaaaagagagaaagaaagaaagaaagaaagaaagaaagaaagaaagaaggaaagaaagaaagaaagaaagaaggaaagaaagaaaggaaagaaagaaagaagaaagaaaagaccaagtacagtgactcacacctgtaatcccagcactttgggaggccaaagtgggaggattgcttgaggccagggattcgagaccagcctgggcatcacagtgagaccccatcactacaaaaaataaaaaaaaaaaggagtggggtatggtagcatgcacccatagtcccagctactcaggaggagtggggaggatcccttgaactagggagatcgagactgcagtgagccattactgcaccattgtataccagcctgggtgacagagcaagaccccatctcaaaaaaaaaaaaaaaaaaaaaggaaaagaaaagaaaagaaaaatggttggaatggtattatatcttaggttatatctattttaccacactaaaaaaagcagataaaaataagctcacaataaacaaatttaaattgcaccgagggggagcacttggtccatgagcagcttcctcatgctcccctggagagcaaccctgacccctctcccagcccctaatctgtgcatctctgcctgcctggaaccttctggggctcccagggtctggggaacagttcgaagaccactgggtctaaggaaaaccccagctggcattaccttaactttcatcacttatgaatcagcttcccaactggaacctgcactattatttacttagtacttttctttaaacagacttacttaaaaatcccttaaatacccaggttagctttgtcctaacaataatatcaatgatgggaattgatgtgctgattacgtctctctatggcacattgaaataaacatataattattacagtaaaatagggtgtgttacgtcagtaagggttaagcaaatggccaaggtctcataactagaaagaagcagaggctggccctgaggcttggcagaccggctccagaattgacacccttgaccactgtcacctacccctggccccgcgacagtcacccgttcccccgcccccgcgacagtcacccgttcccccgcccccgcgacagtcacccgttcccccgcccctgcgacagtcgcccgttcccccgcccccgcgacagtcgcccgttcccgcccccgcgacagtcgcccgttcccccgcccccgcgacagtcgcccgttcccccgcccccgcgacagtcgcccgttcccccgcccccgcgacagtcgcccgttccccccccccgcgacagtcgcccgttcccccgcccccgtgacagtcgcccgttcccccggccccgcgacagtcacccgttcccccggccccgcgacagtcacccgttcccccgcccccgcgacagtcacccgttccccccccgcgacagtcacccgttccccccccgcgacagtcacccgttcccccgccccgcgacagtcacccgttcccccgcccccgcgacagtcacccgttcccccgcccccgcgacagtcgcccgttcccccggccccgcgacagtcgcccgttcccccgcccccgcgacagtcgcccgttcccccccccgcgacagtcgcccgttcccccggccccgcgacagtcgcccgttcccccggccccgcgacagtcacccgttcccccgcccccgcgacagtcgcccgttcccccgcccccgcgacagtcgcccgttcccccggccccgcgacagtcgcccgttcccccggccctgcgacagtcgcccgttcccccggccccgcgacagtcacccgttccccccccgcgacagtcacccgttcccccgccccgcgacagtcacccgttcccccgcccccgcgacagtcgcccgttcccccggccccgcgacagtcgcccgttcccccgcccccgcgacagtcgcccgttcccccgcccccgcgacagtcgcccgttcccccgcccccgcgacagtcacccgttcccccgcccccgcgacagtcacccgttccccccccacgacagtcacccgttcccccccgcgacagtcacccgttcccccgcccccgcgacagtcacccgttcccccgcccccgcgacagtcacccgttcccccccccgcgacagtcacccgttcccccgccccgcgacagtcacccgttcccccgcccccgcgacagtcacccgttcccccgcccccgcgacagttagctgtcccctgcccccatgaaggggcatgcttgcccaacatgttaaggctgcaggtggcagagcatagttctttgtgggtgaggagggagggcgagctgagctgagctttgcttaccatcctcggtggcacctgccagggctgggccagtcctccgttcccttgaacccacaggacaatgacccaggggtcccggactctctacaaggcctggccttcaggctcatgcccagccttcctcagagggctgggggtctgcatcaggttaaccacacggcagcccccacctctgcagccccacccgctgtctccctgacccctcttctgccctaaggcaagagcaggaggcactgcgttggcctcagtcctgagacctcaaggctgagaaaaggttagccaggcaaagagctgcaggaaggaggaaggggtccaggcagggggaacagcacgtgctgaggccgggcatggggaggagtgtggtgtttggggagctgcttgtggttgagcctggctggagctcttggtgtgaaggggccctacggggcagagggtggaggcccggtggctcctattgcatctgtcctgtggccttggcatggggtcaccctcctatcacactcccctggaggctactgatgccgtgggctccaccagtcttatgggtcagtgcggggagccctttgctgtctgcattccgagtcaaagactcagggatgaagggtccttgtaactcattcagtaccccccatctccccactcccaccacagcccagcgcccaaacacactggtgagctccagccaccacgcccctgctcggatggctcagcctgctgggcagcctcattcacccttgaccacctggcacactcctatgctgccctcaacaccccactcaggtgttgcctcctccgacaagctttccacagtggtcccctggcatggccacccttgtgggcctcaccacgcttcgtgattattgtccaagtgtgtctccccaacggggttgaattgcttgaggacctgaatggggcatcaccatctttgtggcccttgagctgtggggtccaactcgattgccttgggaccccctgggagattcgcaggacccattcccagggagcccaggctccaggcccagggtggggcccagtattctgaggcgggagttccggcagagctttcaccagctctgcgaatgtggaaacggaggccgagaggcggcctgagctgtccaaggtcatacagcaactgggaggcagggccagggctcccggctccctctggggttctagctcagggctcaaagtccacccctgtgtggccagcggggagactgttcctaccgcacctggcttccagcagccccggtggtgactgtggctcacgccttcccacagggccttggtagaaaggtcttagtactcaggaagagcccatttcatgcttttgtcctaccctccccactttcacacctgtgcaggctcacagccccacctacctcggggcctttccactgtccagggcctcctcctggaatattctgccaccaaaccatcccatgggggggctcatcctcactgaaggtctcactcgaggccaactcctagggaggcctggggaaccgtggaaagcagctgtgttcaggccctgctcatttctggtctgcaagcctccttggaggcagaggcctagcctggtgcctggctcatgcagggcaagcactcaattcacggaggtggaagggaggcagccgtgggggagaccaccgggtgacagggcagctgggtgggaggaggagggaggccagcccggctcctccctgcctgtgcggctcccactctgggccagtggccttggagacagcagcgtttagagggaggagggagggcgagcggagggccatccatcagcggggaacgtgtagagcctcgtaaatcagggaggctgtctgaggcccctgtgccaagcatctgctggcgtctgggagcctgggagggcaggctgctcctccggggaaaggagacagccacgcctcggggctcccctagttgaggagggcgggcaagcctccctccgtctccccaggcacttcagtgtgttatcccaaatacctaacagcccccaccccaacctgcaaggcaggccataattttgttttaattattttgaattttaatacacaagactgtagaaaataacataacaaatcccaaaacatatccaccctaactttttcattttttatggagggttttgtttagtttgcttttctttaagagtcggggtcttgctctgtcgcccaggctggagtgccgtggcacaatcacggttcactgcagcctccacctcctgggctcaagtgattctcccacctcagccccctcagtagctgggactacaggcacatcccactacaaccggctaatttttttgtatttttttgcagagacgggttttcgccatgttgcccaggctgatcttactgggctagagtgatgctcccccgttagcctctgaaattgctgggattacaggtgcgagccaccgctcccagcccgagatttttgaactcataagattgtgaacgatagcatataaaactgcataaaacacagttgcctaaaatgattagttataaagcagacatcagcataatcaccacccaagtcatgaaacaggaagttgccagccttccccacccccagcatgtgtttctctcattaggcacctctccctgcccccatgattatttatttttttagagatggcgacttgctatattgcccaggctggacttgaactcctggatgcaaacgatcctcctgccttagcctcccgagtagctaagaccacaggcccatgccattgtgcctggctttgccgtttttatgttatgactttatgtgacatcgttgcccagctttcctggcctttaaaaagtataaatacaataaaacattacagataaaaattcccttcttgtgtctcaaccccaccccaggggcaagcataatgatgagatttacatatgtcattccaggctgcatttgatatttttacgacaaatattagagaagtattgttttacatagtttaaaacgtttcacaaatgacaacaatactgtgtatattattctgcaagttgctttttcactaactctaaatgctttttaaaaaacagctgtattgagacataatttatacaccataaaattcaaccattttaagtgcacaatttaatgatttttagtaaatttaaagacttgtgcaaccaccagcaaatttaaagacttgtgcaaccaccagcacaatccaagtttagatcatttccatccctcctaaaaactctaaataggctgggcatggtggctcgtgcctgtaatcccagcactttgggaaggcagggtgaaaggattttaagaggccaggagttgcagaccagcccgggcaacatagtgagatcctgtctctacacaaaaaattttttttcaaaaattacctggacacagtggctgcacctgtagtcccagctacttgggaggctgaggtgggaggattgcttgagcccaggagttccaggatgtagtgagctaggatctcgccgctgaactccagctttgggcgacagagcaagatcttgtctctgaagagaaaacagtctaaatgcttttttgctttctctctttttttttcctaagtgcctttgatacacattttaataactgccccttataaagctcctgcatgtgccaagcactgctgcaaggtattaaatatgccaccacattcactcctcatagcaactccacaaggtgacagtcttagggacgatgacacggaggcagagggggtaacaaactgtccacggtcaccctattagaaactcacagaacaggtggctgcaaacccagtctgaccccagagtcagccacttagccacccactgtgaattcatgcactcttactgtcgcgtgctatgtcaggcaaatgtttttatcctacggtatgaatgagaaaccgaggcttggaggggttaagtgacttgctcagtatcactggacagagaataacagagctggggtttgaatctacgtctacgtgacttcaagctcgctggccctttgctggtctctggtctccttggctgcctttcctttttttcattacagtaaaggaataaaagagagaaaagaggaggatgggtggaaagggggagagagagatgccagaaaaagcttttatttttattttttttttgaaatggagtctggctctgtcaccatgctggagtgcagtggtgagatcttggctcaccgcaacctctgcctcctggattcaagtgattctcctccctcagcctcccaagtagctgggactacaggcacctgccaccacacccagctaattgtatttttagcagagatagggtttctccatgttggccaggctggtctcaaactcctgacctgaagtgatccaccatcccagcctcccaaagagctgggattacaggcatgagacaccgtgcctgaccagaacaaacttttaaattcttttatgctcagcctatatccacagatacttacatatatacatgtgcaacacaggatctctgaacaccaactctagtcagttgagtgtgtgcacagttgtgtgtgtgtaggctgtacacatgtgtgcacacacatgcatatgtgtacctgagaccacatgtgcgttcacacaccattccagatgcacacccacacaggtgtacacaccctaaaaggcacacccacacaggcacatacaggtgcacacccacacaggcacaggtgtacacacacacagctgtacacacacacagctgtacacacacagctgtacacacactcacacagctgtacacacactgaaatgactagaattggtgttcacagatcctgtgttactcagggtgaggagaatgtcagtgtgtatgtgtgctcatgcgtgtgtgtgtgtacatgtgtgtgtagtgggagacaggagttcagtcttccagggtcccctggtggcccatctgtcagggtccagatctgagaaatgctccatcaggggcagaccccttctccgaaaggcactctcagccaggagggccccatgccccaccaccctctctttatgctaccaagtgcttgctgaggtccttagataaagtttcaggacctggaagacggagctaggcatgatctctggggacttcctggccccgtgtggccacgtcgaatccgctgcttctcttttcactggtctggtgcttccatccccaaagctcctttctgccccgcgactcctctgagtctacacagacctgcaagggcctgtaggaaccacacctaacaagcaaccacaagcagcagccagtgagcagacacgacagccagacagcgggactcaccacaggtccacgagcaggtctactgccattttacagatggggaaactgaggcacagcagccttctgcagggccccgtggctagagatggactccagattcacacccaggctgtatgtctgcacaacttggactgcacaacccagcacagagaacactcgacccccgctcacgcaacacagcaggatcccgagcttggaacccaggtgttcacaaaggggtcccgactctggaacccaggcctccacagcaggatcccgaccctggaacccaggcgtccacagcaggatcccgagtttggaacccaggcgttcacagcaggatcccgaccctggaacccaggcgtccacagcaggatcccgagtttggaacccaggtgttcacagcaggatcccgagcttggaacccaggtgttcacagcaggatcccgagcttggaacccaggtgttcacagcaggatcccgaccctggaacccagacatccacagcaggatcccaagcttggaacccaggtgtccacagcaggatcccgagcttggaacccaggcattctagtatccagcctccaagtcttggtcctaccctggtggtttacagaagccgagaagctgacagctttactcacccatgacaaaataagaaaagcacagggcaatgtaggaagtttttcataaagttaaatccctttaatttaaaaaaaaaacagcttttttggttgacttttcccctctcttttctaaaataagggtgatcttatccagtggttcttattttatattcttaatttagcaagataaaaatgtgagcagctgcacgccagcccccaaactctaggggaggtttttctggttcagactgtctcaggttcgagcctccttagggcaccccctttccgtccaccttagcctggaactgagacttctttttcttttgtatctgtccttctcagatctcatatttgtattttccaaaacaatctagttgaagaaatcctatttggtatgtttgaaatctttatgctcccagctcaaactctggattaacaacaaaacagaggaaaactctttttcttattcagcagtcaaacttcaaggcaacttcagccctgggaactcagccagttgctgggaagtaaaggaatcaaaggcttctaaacagtaaaaaatgtctttagagctcggctcagagggagctttggccttcctgcaaattaagaataatgatttggtgagcttgtttatctcccctccaccagcaaggcttggtctccccaggggtaaccggctgcagattcaagaggaagctgggagggctgtctggggctggagaaggaggcagctccaacacgccgcggtcaggcagtgtggggacaaagaggtctccttacttccacagcaccgagtcatcgaagtttacaagacacttctacgttgatctggaaaaaggaggtgttcctagtacatcttagaaagatttccataaaacgggctaaaaagcaatcataaaaccacaacaaaacacaaacaggcaagggaaaggataaacttccatcacctggaagcctcagagacaggagagggtacacaggtgagagccttggctgggtgggaggtaggagtcagaccggaccctctgcagaattagcagtggtgtgcgctcacctctggagctgctcctctgagatgggcctggccccctagataattggagggtcctgcatctcatggcagtttccaccatgccctgctgcagctcgcacccagagccctctgatcacgggagtgggcagctgccatttactgctgcaccattctgaccatgtgccccacgttatttcatgtagccctcactactgctgtgtccaggaggctcagagaggtcaagttacttacctaaggtcacacagctggtatgtgccagagctgggaagagaacgtgcacttgtatgactccgggatgttggctttctgccttgacgccccagcctcttcagctgtggctggtggcaggtcctgggcctctagcgaggacgtgcctggctgtgggcccagcctgggattgacctcacaccctctctcacacctggggcttcactgacagcggcgggcacagtgccttcctttctctttccctagacaccagctctgaccctccaatttccaccatgatcacagtgttctcagagtcaggcagcatatgaggaaaattgccctttccctggaataatttaccatcttgtaatttccattacctgaccctgttggagcctattccgtgctgagctgtttgaatttccagcttggaaatccccaggctgggcgggaaatgctgtttcctgagggaggagcagacgagggaggtgctgcctgcaggcttggcggagggtcagggggtgtttgggacagggacacagtggggagggggctgagaacagcaaccaggcagcatttgtgattcttctgaatccagaggggcttgtgtgatgaaattccacagggctctgccaggctgatacgtgggaagggtggcagagggctactgcgacctacaggcagggggtggtcctaggcaggcaaaggcattggtaggaatgcagagagggctacagaaagcaaggggactcctgggccaggccctggaccggggcacagagtaaggctgttgagggtgttgatttcagtttttgacaagtcgaggatcctccggataccacgtgacaacacacagcttaagagcacgggccttgggctcaaatcctcgctctgtcactcgctggcagtgtggtcctgtgcaagttgacggacttctctcagcctcagtttcctcctctgtgaagtggagggaatggtgtccaccccccattattcctttaatgtgagcgctaactcagggcaagtgtgtaaagacccagtctggcctccagctggggtccatctgacccaggtggtggctgtttacagggatcaactctccccagtttgctgggaactttcctggttttagccctgaaagtcccgcatcttgtgaaacccgttggtcctggaaaacctggatggttgctcactctgcctgtggtctcccgctcctcattgcactaaaagtgccaggtcatgtctgtgtcctggggaaggccgaagcccttgctaaggtttctgtaatatcacctgtggctctgaggcctgctttggctgagttaattcggtgttgaggtcggtacgtgtgcttgcacacgtttctgaaccacagagactcagatgtgacattcagcccccattccccccagatccacaggcacaaagcatctgggtgtcagagacaccgcagacgtttggggtgggatgggggcgctgagatcaccgtagtgcaatccacaggcacaaagcatctgggtgtcagagacaccgcagacgtctggggtgggatgggggcgctgagatcaccgtagtgcaatccacaggcacaaggcacctgggtgtgggagacaccgcagacgtctggggtgggatgggggcgctgagatcaccgtagtgcaatccacaggcacaaggcacctgggtgtgggagacaccgcagacgtctggggtgggatgggggcgctgagatcaccgtagtgcaatccacaggcacaaggcacctgggtgtgggagacaccgcagacgtctggggtgggatgggggcgctgagatcaccgtagtgcaatccacaggcacaaggcacctgggtgtgggagacaccgcagacgtttggggtgggatgggggcgctgagatcactgtagtgcaaacagcatcaaatggaacatgacacacaactcctttggccgccccctgaaagtgtgggggatgcaggggtggaagggagcttcactcagggacctcctgcctcaacccctcactctgacctctgctctttcctctaaattttgttcgtttctaacgtctcttttgtggccttggccccgggttgaaatgtgccctttaaaagcatttttcctaaacgaagacaattcctctccaagaggagctgttccctccccagctgttcagaaaatccaggtgtgtttccacctgcaacaatgccgagctgtcagcttagacttggaaggcgctaagagctggggaaggccacatttggggtctggttccaggccttgcgggtcaccatccctggctgtattagtcctttcctgcactgctataaagtacccaaggctgggtaattgataaagaaaagcaaagtaatgggctcacggttcctcaggctgtacaggaagcttgatgctggcatgtgctcagcttctgaggaggcctcaagaaacttacaatcatggcagaaggctaagggggagcaggcatgccacacggtcagcgcagcagcaagagagtgaggcgggaggtgctacccacttgtaaatggccgagctcgtgaggactcaccaaggcggacggtgctcaaccagtcatgggaaaaccgcccccgtgatctagtcgcttcccaccaggcgccacctccaacgctgagggttacaattcgacatgacacgcgggggggacacagatccaaaccacgtcatcagctctttcagagggagatggctctggaccccactttagagtctggctgatttgctctcccaggtgcgcctggcacagctctcaggttctgcaggagccgctgggcttggacgaagggccctcccgcagtgtgaggagcctggcgacctggcccggtctcaccccacagcctagggcagagatgccacaaagtcacagactttcagggccaagagaccctggagtgcgtctgactcggcctcgtgtttcacagggaatctgaggcccgcactggccaagtgacctgtctgtacttacacactctggaggcagcagagtggaggagagtggtgctatggcctgagtgatttattttagaatacagtcatgcattgtataacgaagtttgtcaatgacaggctgtatatccagcggtggtcccataagactacaaagcagctgaaaattcccgttgcctagtgaggttgcggcgtgtaatgtcacagtgcaacacgttatcactcgtttgtggtgatgctggtgtgaacacacctattacactgccagtcacatacgagtggacagtaatgccctgggccctcacactcaccacacactgactctcccacagcgactccagtcccgcaagctccattcacgggaagtgctctatacacctgtgtcattttaaaacatcttttataccgtatttttactgtaccctttctatgattagctacacacataattccacggtgtcgcagttgctacatgctgcacaggtttgtagcccaggagcccaggctctcccacatagcctaggtgtgctgtaggttctgccacttagatttacgtccgtgctctctatgatgtctgcacaatgatgaaattgcctgacaacacatctcttggaagtatccctgtcgtatcctggttgttaggtgacacatgcctgtacttctgtgtgaatgagtttgagtaagatctcatctgcacacacattaagggctggctagccttattagcataaggaatgtggcagtgggttttctttcatttatttactgtttttgaatagggtcttgttttgttacccaggctgagtgcagtggcgagatcatggctcactacagcctccaacttctgtgctcaagcaatcctcctgcctcagcctcccaagtagctgggactacagctatagtgattttgatagggggggaatttgttgggggtcactgaggcgggctggggcacacagaccagggctccccacgagggcctctgaggcacacagaccagggctccacacaagggccctctgaggtacgcagaccaggctgaggcacagagaccagggctcaagagctgctctgcccaggattcctgtggctgctgtgaactgagtgctcctggccgaggacccacagcttctgggaagtgtaggttggggctcctgatctgctggcccctccctagggatgcagagcacacaggccctgggcctggagtgtttccatccatccacacatccttcttcccatcaggacactggtccatcctctgttcatctgtccatcctctcagatgtccttcagcacattggtccatgcagaatatctatgcacctgtctctccatccatctgtccaatgctccatcagtctgtccatcatccatcctcccatctgtcctccacccacccacccccaccatcccccacccaatcatcatccatccaactaccccctatgcccccactcacccttcccccacccagccatccgttaacccctcccccacccatccttcccccacccattccccactcaactatcgccctacccatcccccactcctccacccactcacccatccatctcctcacccatccctcactcatccagacctccatccatctcctcactcacctgccatccacccatcccccaaccatcctcacccctccaccacccactgacccatcccctacccctccatctacccatgcatccatgcatccattgatccagcaatatttcttgacagctaactagggacccaaaggtgaataagccttgacttctgccttcaggagccgggctctagggaacccagccttgccatgccacgtctggaagcagagcctgggaagaaggtgcagcgactgatctgggcaggcccctgctgtgggggcagggatgacagggcccagcttttggttcccttttccccatgaaagagcctgggcaaaggtggaggcgatggcagtcgggaaggagggagcagggagggagaagcttcatttgtcagctgctcagcaggtacagtcagacttaaaatgtctccaaagagcagccgctgagaggcagggggtgagcacgctgaattattttctggtaattggcactgaagaagctgcagacatcctgaggtctgcatcaaaggctcagagcttcggccgtcttggtggagactgggggcacctcgtcgggggctcctaaggatctctgagctcctgcctcctcctcctcctgcctgcctgctctcctcggtactgtggggtgaggagaggcacactctgctttgctttctgcacaagacagccccggggtggggccgggcgctgcgggtcagagccctgaccgtttgcagaggaaaggaaagggacaggaaactggagcatcaaggccctgctttgcaggggacaccaggacttagccatggcaggggctctgccaatgctcttcacacatggcctggcgaggtccttctcctcacatactccgggcaatgccagtgccaggttttcctttggtctcatccctcccctgtgcagaagagcatttgctggcacttggatgagcaatttaaaggcactggtcctccacatatatttgagacagggtcttgctctgtcaatcaggctggagtgcagtggcacagtcacagctcagtgcagcctcaaactcttgggctcaagtgatcctcccttctcagcctcctgtgtagctggtactacaggcatgcaccaccacgtctggctatttttttttttttttaatttttgtggagatggcatctctccatattgcccaggctggtctcgaactcctgggctcaggtgatactcctgccttggcctcccaaagtcctgggattacaggcatgagccattgcacctggcctcctacgtattctgtaaacaggtgaacctttctgtgtttgtacatactagtgtatgcacacgtgtgtgtgcgtctgtgtgccgtccatctcccctggcgagggccccttctgcctagtacctccaacagctggaccctccagctggtcaccttatgtaggaggcttctctcccccatgggcggagtgcagggcagggtggcctggggtggaggctgcaggcaggccagttccccatccagcctcagcctccttcctgctggggaaccaatcataggggaggaaactgagctttttccttacagccacctcaggctcattggctgggccccctgttaaaaaaaaaaatacaaaaaaggggggggcagattaaccagagaaaagtctgagcatgtatttagcatgtgttacgtcacacggaagctccatgaagaagtgaacacctgaaggcaccacagaacccgagtgtttcttacggcaggcagctcgatggggaaacgtgattgggtgagtgtttcttacggcagctggaggaaggtagaaggtggcggggaaacgttattggacgaatgtttcctacggcagctcgatggggaaacgtgattgggcgagtgtttcttatggcacctcgatggggaaacgtgattgggtgagtgtttcttacggcacctcgatggggaaacgtgattggacgaatgtttcctacggcagctcgatgaggaaacgtgattgggcgagtgtttctcacggcacctcgatggggaaacatgattgggcgagtgtttcttacggcagctcgatggggaaacgtgattgggtgagtgtttcttatggcagctcgatggggaaacgtgattgggcgagtgtttcttatggcacctcaatggggaaacgtgattgggcgagtgtttcttacggcaccttgatggggaaacatgattgggcgagtgtttcttacggcagctcgatggggaaacgtgattgggtgagtgtttcttacggcagctccatggggaaacgtgattgggcgagtgtttcttacagcacctcgatggggaaacgtgattgggtgagtgtttcttacggcagctccatggggaaacgtgattagacgaatatttcctacggaagctcgatgaggaaacgtgattgggcgagtgtttcttatggcacctcgatggggaaacatgattgggcgagtgtttcttacggcagctcgaggaaggtagaaggtggtggggaaacgtgattgggcgaagagaacaaggtcagtggagtgagcggggacctgagccaggcatgtcgttccaaccccgctccatggtctcgcgataagatgctcctttcctccaggtaccagcagaaagcaggcgttttctcatgtgggaaagatgccggcccccgctgtttggggtggaaatcctctaacccgctgggcctgtgcgccagggctgagcaacagcgcggagccgtgcatctgtcgggggcgggacgcggcagcagggctgtgagggctgcgttttctctgccagcctgatccgcatcccctgcccctcggtcgtctgccagtgtccgtgtatcttttgccccagctggtgcgggtttagggatgtcagccccaggagtcacaggtgagctggttccaatgggaacctcggcatcacctgggaactgaaatatgcattgtcagccccacggcagacctctgaatcagaaactccgaggtaggattagtgtgttctgtgttctaacaagtcccttgggtggttcagatgcagcaggaggacggggccatgtccgttttgtccactaccaaacccagggcctagaacactgcacctgcaccagcatctgcccgattaatgctcgacagaggaatgaatgtggataagcaccattattccaaagccccaaagggagaagcatgaaggtttactgtgccccgggtaccaggctgccacccttctcacgttcttatggcatcttgaccactcctgaggcacgtgcctcactgaattctacgggagaaacagctggtagctgttgacatactggtcacggtggtgggagctgtactggggccctcatgttttaaatttccagtcatcctgggacggaagtgttatccccatttcacagatgagaaacagaggcacagagaagcacccatactttcaggcactaagtagcagatctgggatttgaaaccagggtccaaagttcatgagctctccacttgcggcctcttctaggaaccacttgggttatctggtatttgggacaaatccagtcccttccgtatgccctgatttttacggatgtcacagaacaccttccaccttctaccaggaaaggctcagttctgaaagctaacttgtaagttggttgcttgggactaagaaagcagtttcataaagaaaggatttcttggttcccagaccagcccacaaagaacccttgactccaaggcagccgcaggctcccgtgagggatctgcagcccacctcagctctgaagctgacacttccacgatgacgtcgtcttaatgaatgccttctaggaaatgcatttggaatccaccctggggctgcagggactgggtctggcccagtcatggggttctggtgggggctgagtgtgggggctcatctgcatcaggtctgagagggctttggtcctacagaggcgtgggtagcgcacctgcagcttagaactgcgggcagaggcccgagccactcccaggctggtgttcccaggtcgggtgtggacctagggactgtggggcagcccacaggctgtcttttctctgccaggcaggtgtttactcactcatctgctatggccctgggctcactgccgccgccccccgccctgtgggtttgtcagcagtttgatgtgtatttttccataaaaattcattgttatacatgaaatatagtaggttttaaaagggtaactgtcctacaaagtttataacataaagcaggaatcccctgctcacctcgagacaccttagaactcttttagttccttggtatctaaaacctcatgcggattctatgtcttgattttgtaattttatacagcattatgtactataaaatatcacgatgtagctctcacttacgatctccctgagacacatatgcttcttgtatatccttgtgcacctcctctgtcctcatctgggctggctggaccagccacccagctccaccatcaccctgaggattctctcctgtgtgagggctccagtttcttgtgcccattttctcttggttttctcccttgtttggttggagcacatcctacagtagctgcccgagaaagagggcaagggaggtgatatttttcaagaactcacatgtctgaacatatcttcattctaacttcacactgcacgaagttctagctggatagaaaagtcaacttagaaattgtttgccctcagaattcagaagctcttgcttctctgtgctcggacttcaaaatttgctttgagaatttcagcgccatttaaattcctgatcctttgtatgtgactttttttttctctctttggaaggctttgggatattttctgattatcctggtgtcctgaaatttcataagaatgtttggtgtagttccttaatttactttaaaatatttctgacatataaaaaataaaaatctaggccagacgcagtgggtcacgcctgtaatcccagcactttgggaggctgagacagatggaccacaaggtcagaagttagagaccatcctggccaacacggtgaaaccccgtctctactaaaatacaaaaaattagctgggcatggtggcacatgctcgggaggctgagacaggagaattgcttgaacccaggaggcggaggttgcagtgacctgagatcgcgccactgcactccagcctgggcgacagagcaggactccatctcaaaaaaataataataatacaaatctataataaacatataaatatacaatatgaagtaaaatataaatattacaaacccatctacctatcactgagcttaataaaacattaagattcctctttaattgtatttctcctcttcccaagatgtgtcctgagtctgttgttttgttatccttcctgtttctgaattctcttgctgcataaaatatattttaatatataacattcttgcatgtttgtgaaatctctatatagatggtgtcacgtatttttctgccacctgtctctttgtcagcattattggtgagatacacatactctgagggtggtgactcaatttcaccactgcataatattctattgtttgcatatatcacaatttatgtacctattcttctgttgaaggcttttttggttgcttctaaatttgagctgtaaatattcagtgcatgtctcctggagcccatgtagatgagtttctggagggaaatggtcctgaggcctcccagcacattggagtcatctggagagcttcacaaatcccgatgccagccaaggatacatccaaaatcgattaaaccaaaatctctagtggtgggtctgccaggagtacttttaaagctccccaggtgattccagtgagcagccaaggggaacaaccactgccctagaccaatgctactcaaggagtgtcccttcaaccatgtgtcacctgccagcatgttagatgtgcacactggggtcccgccccagagctggcgagtgagcatgtgtgtttcaggaggacctcagggatggctgcaggcagcgcccaccttcgtctactgggcatcaccaaactgctgctcgggatggtggaggggccacacgggtgtggaggcttcacgtccctctgccggtcacttacaggctttctctatggaagcccattcccttcagtcctgggaaatattcttgtgtcatttcttcaacaatctcctctcctctgttttctgtttcttgggttgaaattcctatttgatggaggctggatcttctgtgttgagctgatcttgttgttgttcaatgttcttgactttttcctcttttgcttttatgcattttactttctgggagattttctctcctcttccatcccttctcatgcattttaaattcctgctattatatttttaatgttcaagaacttcaacactgcctttaaaaaaataaaattcttttctcatttcataggtgtaatacttcaggggattttcctctccttttttctgtgtactggagtctctattttcagttattggatttcatcaaacgttgggtgcccttggctgtccccactctgagtgaaacacagcaaagctaataggcagcactgaacatgtgggtgaggcttgtggactggaggtctcacagtggactgggcagagacccactgtttggggaacccccagtgtcaggatctgtccatctgttctctttgatcagtttcccagagagaaattcaataatgtcctgccagccaggtgcagaggctcatgcctgtaatcccagcactgtgggaggctgaggcgggtggatcacaaggtcaggagttcaagaccggcctgaccaacatggagaaaccccatctctactaaaaatacagaattagctgggcgtggtggcatatgcctataatcccagctactcacttgaggctgaggcaggagaatcacttgcacctgggaggcggaggttgcggtgagccgagatcataccattgcacttcagcctgggtgacaagagcgaaactccgtctcaaaataataataataaatgtcctgccttgggggtggatggatggggactaggcctggcttttatcagcctccatcagggattttaaaggggaatgagggcgtccccatttacatcctgatttcaggaaggcaccttgccccagcctttggctacccttggggtccccaatccagaatcttttcagatcaccattggccggcagtaaacctgtctcctgccatggtcagagaagggcagtcaccaggccgggagaggggacctgagggtgtaaacacttctttcaatcaagacaattctcagacccaccctgaacttccacctttgggacacctggcccctccaagttctgtgcatttgggggattctgcaaagcaaatgggcttgttcatgcttggcttccttctttgtagacattttgaggctgacactaagcaaatcatactgttccagcttccaaagctcttcagatatttgtcattcactgccatcttctctcctgttctttttgtctttgtgctttatgccattttcattcctttacgtcattctagtggggttttgagggacagaggaaaatatgaatatattcagtgcaccatatataaccagaagtccttgtgcatttaaaagacatttttgcatacatacgtatgtgtttgcagaactcattctgattatttgtgtgtacttttgtatgtagatggccttgcttatccgttcagcatcaggtgtgtgagctgcatgaacacacacagatctagcccctcctttcactgcggcttaggaagggttccagcaagtcaacgcaccacagttttttccatttttccatggacgcatctcagaaacacaggcaatcgtggtcttcgatcaacacactggctcggtgcaaattttaatcttcattgttttaattctgaagcataacgtgccacagggaaagtgagtttctttactgtttgccagcagcaaggacaaaaagtgaatggtgggggcccaggagctcccagcttggagagaaggcccttccagacccaggaacccggggtttggggcaggaggcaggaaggatgggagggtgtgatcaccgacacacacacacacgttctctctcttcagggaagggttttccagaagcatttgcccatactctgaatgaagtattttcatgccaagccaaacctcctgaagagaagtgaattcatggctgagggagccacgtgccctggctggggatgcacctgaacgctgctcttcagcaagtgagttcatagcatccaccagagcttcccagctcctcaagctgaagacaggctgagcaaaaaccaggcaggccatgaggggattcaaagaaacctaataggattgggtgcggtggctcacacctgtaatcccagcactttgggaggccgaggcgggcagatcacttgagaccaggagttcaagaccagcctggccaacatggagaaaccccatctcttctaaaaatacaaaaattaactgggtgtggtggcgggcatctgtaatcccacctactcaggaggctgaggtgagagaatcgcttgagcccgggaggtggaggttgcagtgagccgcgatcgtgccactgcaccccagcctgggcaacaaagcgagactgtgtcaaaaacaaacaaacatacaaaaaccaaagaaactaaacagacccaggtttcacccacggtcctgggccagcccatgggaggggggcactgcgcctgcctcccagagctgaagggagagggagagggtgggtgagtctccccctcactgctctggctctgatgctcacctctaaggggccacacgcagcttcggaggccgtgccctaggtttcatttagtcttgccattaatatagcaacggagatagccccaccgggcggcccctctgacactgcatgtgggaaaccccccagcccaacccaagacacgcgcaaacttaaaatcatcaccaggtagattgggggtgtgggaggggagggtaataaataaggtcgggggctgagggcagtggttggagggggtggcggatgcagacagctccccaggagagaaggggtgcagaaaggcactgagctggggaggcagacggctcccaacactggtttgttgagtcatggccaacagggtgtctggtgagggcacaaggaccggtcagggaggagccgggcagggtctggcaggaatcctccacagggaagtctgttccaggcaccagacacctcagcccaggcagctggaggggcctgctggagctgcgtcagcagcgggggctcgtccaggtgtgtcttttacctttggatgagagaaaaggccaccacatggtgagcagcggtggagtccctccctccccggtgacagctcggcctttgggaatgagatggaggagctggtggggaaggcaggcttctgctgacagcatccgtgcctcagcccgagctcgagaccagcaccgctctgctctgctgtgtgatggcaggaaagtcacctgcccctctgggcttcaggccctcctcctaacccaggtgatcaacatggcgacctcaggatgccggaaggagcaaatgggcacggaaagagaacaccctcctttaagccaatctttccccaggttgtttcttaagcccaggaaccctctctgcactgggccacacagcttccccctttatcactggacatttactgaggacctcctaggggaaggcagtccatgtgacactggattttgtctccccggaaccctgtgaaggacaccgtaccgataatagaactgggcacagagagatcaaatataagggtgaaccatattgaactgccgatatttcactgtttttgaaccacaaaaatgcaatttcaattgggcgcagtggctcttgcctgtaatcccaacactttgggaggccaaggtgggaggactgtttcagcccaggagttcgagaccagcctgggcaacatagggagaccccgtccctttgaaaaatacaaaaaataattagccgggcatggtggcacttgcctatagtcctagctacttggcaggctgaggcaggaggaccactggagcccaggaggtcgaggctgcagtgaacggtgatcacaccagtgcactccagcccgggcaacagcatgagatcctgtctcaaaaaaaaaaaaaagcaatttcatatggttcaacctgggggtctgctcaaggtcacatggctgtgggtggcagggctgggacaagaactcggggctgccggattccacactgtcctctgtggaggacctccaggaggctagagggagggggcagggtccactccacagccaaagatgcctcccggatgctctgcagctcctgggagccatcgagtggggaaggagagaggtgcggcaggcgttcctgtgggtggctgccgggtgccctccacaccccggggacggagatcagctgctgccctggtgcatgcgtgtacccatgaatcctctggccagggaggggcccaacctgcccagggcttctttcttgaaggagacagggctgatcctgcacctgcgcagttttctctggcttcagtttaaggagaaccctcacccccgccacaggatgatcctgggccaaccagggctgggcccagcaggtgcagggcagggtgggagcccaggattctcccctcactctctctctgtgccttggtttctacacccatcaaatgggacaataagcctcccagccactctgccaagagaatgaaagttcgccccaggggagcccgacacgttttatgtagcagaggatggtaaccactgctgtgattaccgagagtggctagggatggctaccattatcattctgggtccctctctctgttccttgcaggcagggatggggtctggctcaccttgttcccccgcacagtgcttggtaaacaacatgcagaattgaaaacgtcaccgaccagtctccagtttgggaggagtgagtgagagaggacacggccgcgggggcaggagaggggagaaggcagcagttgggtactcaccggggcccttcgggtcagcccggggcggggtccccctggcgggtcagcagagcctgtccccgtctcaccactggccaggctgctctggcacccagagaggtggcccggcgggtgggtgaaccccatcctgggggcctccacgctgccacctgtgggaaatcacgtgtgggccccgtggatctcaaaccgagacggggtgatctcagtccagttcctcgtttggaactctagatctctatgggatgtctgccccccaccccacccacatggctgccaggctctggcctgacctcacccacatggctgccgggctctggcctgaccccacccacatggctgccgggctctggcctgaccccacccacatggctgccgggctctggcctgacctcacccacatggctgccgggctctggcctgaccccacccacatggctgccgggctctggcctgacctcacccacatggctgccgggctctggcctgaccccacccacatggctgccgggctctggcctgacctcacccacatggctgccgggctctggcctgaccccacccacatggctgccgggctctggcctgacctcacccacatggctgcagggctctggcccgaccccaccctctggctgttgctggtgggtccaagaacgggcctgcaggtcttttcactaagtcacagatcaccaacatgaaagtccacaattatcacagaatgggggtgggggtgggggatatatattttggttaacctaatgagagagagatgttgactgctgccttaactcactaaagggtcttcactcaaacatggtttctggtctttgcctggccaagagagcagacgtggagcctgctactttgctgaacttctcttgtctcccagtcctgcttggtcagagctgagggtgggtgtggagcgaggggacaagagcccatggtgggaggaggaggggagtataaagcctgccctggaaaccgaggctggcaggtaagtttcctttatactcttctaaattttctctagaatcttcagcctgatggagcctgggaagtcactggtccagggacagttttcatctcttgcaccatctctacctgctgatattggccacttagaaaactgcactgaggaggattctgagggcacatcagggctctgtggaaagagtatcatgatcacctagtaatgtctgccatggtcacaggagaggggggtggtggtacgtgtgtcaggtctttgccagctctgatttagctcaaacttccattcccaacccagtcttggtcccaagacaggacccccaaggcatttcactcccatctggggcagttattacagagcccttcttctgccctaaaattggcctcgctgaaatcaggacccccaaggcatttcattcccatctggggcagttattacagagcccttcttctgcactaaaattggcctcgctgaaatcaggacccccaaggcatttagttcccatctggggcagttattacagagcccttcttctgcgctaaaattggcctcactgaaatcaggacccccaaggcatttcgttcccatctggggcagttattatggagccctttcttcttctgcactaaaattggcctcgctgaaatcaggacccccaaggcatttcattcccatctggggcagttattacagagcccttcttctgcattaaaattggcctcactgaaatcaggacccccaaggcatttcgttcccatctcgggcagttattacagagcccttcttctgtgccaaaattggcctcgctgaaatcaggacccccaaggcatttcattcccatctggggcagttattacagagcccttcttctgcgctaaaattggcctcactggaatcaggacccccaaggcatttcgttcccatctggggcagttattatggagccctttcttcttctgcactaaaattggcctcgctgaaatcaggacccccaaggcatttcattcccatgtggggcagttattacagagcccttcttctgtgctaaaattggcctcactgaaatcaggacccccaaggcatttcgttcccatctggggcagttattatggagccctttcttcttctgcactaaaattggcctcgctgaaatgaggacccccaaggcatttcattcccatctggggcagttattacagagcccttcttctgcgctaaaattggcctcactggaatcaggacccccaaggcatttcgttcccatctggggcagttattatggagccctttcttcttctgcactaaaattggcctcgctgaaatcaggacccccaaggcatttcattcctgtttggggcagttattacagagcccttcttctgcgctaaaattggcctcactggaatcaggacccccaaggcatttcgttcccatctggggcagttattatggagccctttcttcttctgcactaaaattggcctcgctgaaatcaggacctccaaggcatttcattcccatctggggcagttattacagagcccttcttctgcgctaaaattggcctcactgaaatcaggacccccaaggcatttcgttcccatctggggcagttattatggagccctttcttcttctgcactaaaattggcctcgctgaaatcaggacccccaaggcatttcattcctgtttggggcagttattacagagcccttcttctgcgctaaaattggcctcactggaatcaggacccccaaggcatttcgttcccatctggggcagttattatggagccctttcttcttctgcactaaaattggcctcgctgaaatcaggacctccaaggcatttcattcctgtttggggcagttattatggagccctttcttcttctgtactaaaattggcctccctgaaatttctttcaagggtcccagttccgacctgtggagtgaccgaatgaagctggcccttttcccagaagtcctttgtgtgtttgaaggacaggaaaatgtctttcctttcctctcccaggccttctctataccagtctcaatgcccccgttaaccctctttcatacagcagtttcccagagggtgagctcagggatctccaagtcagaaggcgctttggaggccacccgttctgtctcacttgctaacgagaaggaaatgcaggcccagaggtcacagcaggtcctggggaccccatggtggtttcatggcaggactgacctagtgcagggaggtctgcacctgattttctcagctctcatgattgaagaggcaaactctcagttggggaacgctcacaggtgggcatgggaggagtcccaggtatgcaggccaagggcatgggtggcctggctggccctggctcctgtcctttgcctgccctcctcaccctgctgtgtgtacagaagagcctcaaggagcctgttgtcccatccctaggcctgcttctccttccagatgtagaagaactccttggacacccactgggaagcagcaaaaccactctgtccctggggctttggaaataaacagcactttttttttttttttttttttttttgagatggagtcttgatctgtcgccaggctggagttcagtgatgcaatctgggctcacatcaacctccaccccctggattcaggcaattctcctgtctcagcctcccaagtagctgggattacaggcacccgccaccacacccagctaattttcatatttttagtagaggtggggtttcaccatgttgggcaagatggtctcaatctcctgacctcatgatctgcccaccccggcctcctaaagtgctgggattacagacataagccactgtgcccggcctaatagtttcatttcttttctttttcttccttttttttttttttttgagatggagtttcgctcctgttgcccaggctggagtgcaccgtgcccggccaataagcagcatttcactccccaccttacctgactccttccagggtttgtcgcctttccggtccctgaccccagtggatgggagtctgtcctctaggctggaggagctaagatccgagtcactgtcactgtcactggaaaccactggaagagacagaccacagcacaggaggtcacccgaccagcccctacctgcaggcatggacggagggacgagggcaggcctccccagctcattaccacgtggcgtagcagctcagctggccctttcgctttgggcagaagaaataatggcctggggatgggaggacacacatttctgctgcacaaagaggggagtcctgatgtgaggaggctgggatctgggctcaggctgaccagcagagaagagttcacctgttggccagccacctccacatgacaacccctgttctagttcctctagtggaaccagaacccactggccgtgtcggaggctgattatcaccgtgatgcaggcacaacagatctgaggcctccactcactgagacaatagacccaagaacaacagctctgaggcctccactcactgagacaatagacccaagcacaacagctctgaggcctccactcactgagacaatagacccaaaaacaacagctctgaggcctccactcactgagacaatagacccaagaacaacagctctgagggctccactcactgagacaataggcccaagcacaacagctctgaggcctccactcactgagacaatagacccaagcacatcagctctgagtcctccactcactgagacaatagacccaagcacaacagctcggaggcctccactcggtgagacaatagacccaagcacaacagctctgaggcctccactcactgagacaatagacccaagcacatcagctctgaggcctccactcactgagacaatagacccaagcacatcagctctgaggcctccactcactgagacaatagacccaagcacaacagctctgaggcctccactcactgagacaatagacccaagcacatcagctctgaggcctccactcggtgagacaatagacccaagcacaacagctctgaggcctccactcactgagacaatagacccaagcacatcagctctgaggcctccactcactgagacaatagacccaagcacatcagctctgaggcctccactcactgagacaatagacccaagcacaacagctctgaggcctccactcactgagacaatagacccaagcacaacagctcggagacctccactcggtgagacaatagacccaagcacaacagctctgaggcctccactcactgagacaatagacccaagcacatcagctctgaggcctccactcactgagacaatagacccaagcacatcagctctgaggcctccactcactgagacaatagacccaagcacaacagctctgaggcctccactcactgagacaatagacccaagcacatcagctctgaggcctccacttggtgagacaatagacccaagcacaacagctctgaggcctccactcactgagacaatagacccaagcacatcagctctgaggcctccactcactgagacaatagacccaagcacatcagctctgaggcctccactcactgagacaatagacccaagcacaacagctctgaggcctccactcactgagacaatagacccaagcacatcagctctgaggcctccactcggtgagacaatagacccaagcacaacagctctgagggctccactcactgagacaacagacccaagaacaacagctctgaggcctccactcactgagacaatagacccaagcacatcagctctgaggcctccactcactgagacaatagacccaagcacatcagctctgaggcctccactcactgagacaatagacccaagcacaacagctctgaggcctccactcactgagacaatagacccaagcacatcagctctgaggcctccactcggtgagacaatagacccaagcacaacagctctgagggctccactcactgagacaatagacccaagtgcatcagctctgagggctccactcactgagacaatagacccaagcacatcagctctgaggcctccactcactgagacaatagacccaagaacaacagctctgaggcctccactcactgagacaatagacccaagcacaacagctctgagggctccactcactgagacaacagacccaagaacaacagctctgaggcctccactcactgagacaatagacccaagcacatcagctctgaggcctccactcactgagacagtagacccaagcacatcagctctgaggcctccactcactgagacagtagacccaagcgcatcagctctgaggcctccactcactgagacaatagacccaagcacaacagctctgaggcctccactcactgagacaataggcccaagaacaacagctctgaggcctccactcgctgagacaaggcccaaggcaatgctctgcagggatgtggggacagtcagagctgacccttagggagcattccaggcagtttccatggacacattcattgaagtttcagaacaattctgtgaggtaggaaacagcattacccccatttcacaggcaagaaaacgggggcacgtgcccaagttgtaagtagaagagccggattctcatcctggcaggctggctccgtggctcctgctcacaaccctctgattttactgcaagaattgaactggaagccagcaggcctgggctctcatcccagttcatccagtaacgcacagtgcagtctcacaaatgcggaagggaaccagacggatggggctggaatcccagcaaggggaggtgaggatgttgtcacagtgaacatgcactgtgggagaaactctcttttctggactaaatggaaaccgtatttggctgggtaatcaacagtgagagtcataatacaggatatagctaccctttaaacattctattttaatttttaacacagaaatgtacatccattcaccaatcttttgatgccaggcttgggtgcttctgcaagattggcccacacagtctctcaggtataaactgcacccgtattgcattgtctgtgaccccaggtgcagtttctctgaattgcagcgggacccacagaccctggccaagcaggacaactgcagaatcctcctttttccatttcttcctcttggtttccacagttgtcctgcccacccctaattccatatatttttataaagcaagttgcctccatcaatactttccagggctgggtgtggtggctcacgcctgtaatcccagcactttgggagggcaaggcgggtggatcacttgaggtcaggagctcaagaccaggctggctaacatagtgaaaccccatctctactaaaaatacaaaagtaagcttggcgttgtgatgggcacgtgtactcccagctactcgggaggctgaggcaggagaatcacttgaacctgggaggcggaggttgcagtgagctgagattgcgccactgcactctagcctgggtgacagagcaagactctgtctcaaaaaagaaaaaaaaaaaaagactttccaaagtctcggttttcatgaaacaattgtctcttttctgcctctttccatcaattcgcataacatttaattaagtgatatcattgcaataccaagtacaacagcacaggaaggtctggatcaagggtaacagctctcataggcgagaaactcagcagatgggacaggagtcatgggcgcctgtcagcgttttccttggggaatgcaaaacactggtggttacggaggaaggttagggcgggttgagctcttatgccaggcactttgctgggcccttagtgagcatcgtcttccaaacaaccctgagccgctggtgagaggtaagactggaaacaaaatccgtctatactgcggtggctagcacgtttcatctgatccagtgagccctttctggagcagtgtgtagggaagaattcagagaccgcactgaagcttagtgggaggaagtgcctggtcagttatgaaaatccaccatgggcactgggatgaggaaacggtagctgccatgtagatccagaggcttctggaaaagccttcatggctccagcctctgtcacctttcagctaagggagccacaggtcttggaacaagcaaccagaggctggagctggctgccgtgaagacctggaagactctcaaccctgtgcacccgcagcagagcggccagcacacagtgggcgtgcccccaacagagcggccagcacacagtaggttcacccccagcagagaggccagcacacaagggtgcacccccagcagagcggccagcacacagtaggtgcttcatgaaggtcaggggactcgtggtcttgcctcttttcccctcatgtcctgccagtttcactcaaatggttcttaaatcagtcacttcctcaccattgtcactgccttaactcgaggtgtcagctcctccaacctggactcctgtgacaatgccccaccagggccccacctgcaggcactccactctgtgttctctgcacagccaggggatgctccagcaaaagcacagatcccagcttcaccctctttaaaggttccccatgcccccaggaccacactgggctcctgccctttgtctacttttcctcctgcatcccacgccacctgctgtctcaccctgggtgcctccagcctcctgcggcttgtggctcctgccagcacctcccgctgggactggcttgcccctgcccagaatgccctgcccacccgtcttctcttggcacagaaaactgtcttctccaggaagccctccgtctcacctgtgccctggctggctgaatgccctgtgctctctgctacaactgcaccaaccactgtctgctctgtttgcatgtctgcttcccctagcaggttgtgaggctccttgagggcagggaccaaattgcacatgcaaatgaggctggtgtggctctcctctctgtggacctgacctgtacactggagcaagagtgatgagcatggactattctcaatagcaaagacttggaaccaacccaaatgtccatcagtgatagactggattaagaaaatgtggcacatatacaccatggagtactatgcagccataaaaaaggatgagttcatgtcctttgtagggacatggatgaagctggaaaccatcattctcagcaaactatcgcaaagacaaaaaaccaaacagtgcatgttctcactcataggtgggaattgaacaatgagaacacttggacacagggtggggaacatcacacaccggggcctgtcatggggttgggggaggggggagggatagcgttaggagatatacctaatgtaaatgacgagttaatgggtgcagcacaccaacacggcacatgtatacagatgtaacaaacctgcacgttatgcacatgtaccctagaacttaaaatataatggaaaaaaaaaaaaaaagagtgatgagcatgggatcaggcctggcctctccttcctccatctgctcagaggctctgcctttttctgtcctgctccccaggaagagttctactccggctccttggacttttatgatgccgcagcaagaggagatggggatggggcatggctgtggtccgtgtgccctcttcgtagtacttgagaaatgcaaggaaaacctgccttattttgcagttgtttttcgggtcctggactgagctgctttgatcatgaatccaccaagactggacctcatgggtgtcagttttataagcatttctgtagttttgactcactgatgagatgccaacctcatgggtcccatgaaaaagggataggaggaggtgggaaggagccagggattcctgctgggctcctggagcaagttgttcccatgttgcccttggggcagctacagtgaaattagaggcctgtggctcacacttcccgggagcagggaggtgtccagcaggaggacagtcctgcggagggtggggtggctcgtctgcacaccggtttccgcctctctctggcagagatgcttatgggaggtctagtcatgcttcctgacttggaatgtcccatctcccccacagctaatatggaaaatctacacagtctggggctggcggtgggcacggggctccgtggtgtcacacagtaccaggctcctttggtgcaaaggggcagatgtcaaaggactcagaaggagacgatgggatgggatgtcccaggactggggttagggaggtgagctcaccctccatctccccactcttccttgttctgtcatctatcacacatggtcacagagttgggctgggagcaggcgaaaacggcaagacaaccgtgaaccatgccgtgccatgtcgtgaggacggcgtttgttatgagtcgtgcattttatccaaaacagcaaccctggaggtggagttagggtcagggtgccacctggcctagtccccatttggtgcccgtgtgcacaaggattcacaaaaaacaggtagaaatcctccctgagttacagtcaccttgttcttcatctccatttatagaccccaaagggccacagccgtgaagaagtggggaagagcctcagatgccaactgagctcacacaggtgacacagcaggcgccaggaagccgatgagacagactcatctcattagatgcatcctccctggcttgttcttcatctccgtttatagaccccaaagggccacagccgtgaagaagcagggaagagcctctccgtgactggaccctctctgctcactgtgttgggatttcaagctggggcttagaggtctttgtggtacagacccaaatcccatttctaatccactctaataaacaccactcgaaagaaataaaccaaaggaagtcagcagtgcccgcaccagccttggcatttactggcagggcggaagggccacaccgagcaaaccctgctgagaagccctgggcccaacacaaacacggtgtccccaaatgttcctggcttcctcgggctgcaaaggaagaagccttttcttcttcctccctccattgaaatgtcaccgtaaaactcaaacttcggctaatttgccattcgattgctgttgccacctttctccctgcatagcagctgtgattgtcagtcttccaggtctattcacaaagatttcagactcatacatctggcccttgctcttccatcctcaacataacactctgtgtgtctgaaggctgatacattttttttctctctaattctccaaaggctgagtctgggatggctcaccgacgagccctgtattctgcccacgcctggtttttcagatggaagatgcgagtacaccagggagaaggctgtcccaacagcctttcggaggaagaagtatcatggagtcacccgggtgccgccgagaggcaggggtgggggagaagctcccctcctgggcccctccacaggggcctgagccacttgctggggacctggcatccctgaggcttccccactgcagcccagaagggctgcctgcttgccgggtgctcatcctcagcagtggccagccccagcgccagccgtgcccacttctctggggagaggccagcttttctttccccctgctcactcttggctgggtttgcaatttgactgtcaccatggaaacgcagggttttggtacacggagcggggggaagagtctttccttctggaaacgctttcttgactgcctcaaaggacatgggcggcagctgtcctgtggagaggcctggcctgggatggtccaggggacaggcgtcatgctggccgtgtggcctcacagcactgcgctggggatgtgggggccctgcttccaggctctgctcagccaccacctgtctctgtggccccaggcatctctccaggcttcactacaaaaacacaggggctgacccaggcacccactctgggtctgaatcctgggatttaaccttgggtcagcccatgggtggagacagccctggtgcctctccctggtcggggtggggagatgctcccactgggccacagagcattgccgcccggcacaaggacagccagcagcctgagtttgggaggcacttgtgagctacggccactctgcttggaggctcccaaagcccccagaaattatgggaattatagaggaagagagatattttcagcaaacattctgccaaggcaaagcagatggtggaaaattttgcatactaaaaacaaaaaaaaaattctctaatgtaaaggaatgatgataaggcccctgggagtgtagacactcccaattagccgtctccagcccaccaggcaggcacagctgcagagacgcaggactgtctgtccctgctgggacaggggacggctgctccacctgcacacagggtagggtccttggcctgaagtcccactgagatgtctcccaaggctggggctccatcttggtggcagctggaggggagcctggggtgggggagtcaccggctctgagacttgggttggtgtcctgcctctgccacctcccagtggtataactttaggccagtttcctattttttatttttagtttttgtaaagacatcatctccctatttgccagggctggtctgtaactcctgggctcaaacaatcctcccgcctcggtctcccaaagtgctgagattacaggcgtgagtgcccggccctggagcagtcctttacctctctgtgtgctcaggggctcgcctgcggagagggggatggggactctcaccccgggttgtcgtgagggtcaaaaggagtaacgcgttcggcatctggcctgtggtaggtgcttgataggcaagagctgttacatttcagaggcagctggaactcacgggcccacaccatgcagcacaggctggccctggggtgcccaggccaacctcgcaggtggactcacccctttcgaggaagcgtggattcccaagctgggctttgtaggacacccaggacacaggatgccttcagaagtcattcagaggcagagctgggatttgaacccaggcctttctattgccagacaccccgcttttccacctcaccaagcacgcaggatgccccagggtcctgcctgaccctaacggctctatcccctcagaaatcctcctctccaggcggccagtcccctctcggtctccccaccatgctcttctgtgccctctctggaccctttttctgtcgcagcagaggctgcagtgtgggagagagctctagttcactctcagcagctagggttgagctctggtcctgccttggatgctcttgggcaaataccttaatctttttcaacctcagtcttcccatctgtaaaatggagacaaaaataactactaagcaggacaaacagctttgcaaatttaaaaggctatacaagcctatacatatttttaaaaaattagaatctaatccaccccctccaggaacccattcaaatcatttctccactgaaaagtctcaatcctcacgggcaaaatgccaatggaaagaagcagggaagacgcaacctccctcctctccccacccagatgctgtctggcttgcatttcagctcctaccaatgcctgcctcaacttcctcaacatattcaggcaccactcgagggcaaggccatacctaaaggcaagtgtcccttccctcagccccactgctgggttttgggcaaagcggttactcaggaaatacttgctgactgttttcctgaaaatgctccccaggacaggaaaccgcactgtacaaagacagcagggccagctggggtcagcaaggggtgggccacagagggaaaggagaccccagaccccatctgtcacctccatgtcccccaaagagctggggtttcccccaggacaagcgctgggcaagcagcccttctgagccacgacggagggacctcagggatgccaggcccctctcccagcctcccctgaagggacactcagggggatgcttggtggcctcagcctggcaaaaaacagctgaatggggaggggctgtaggaggctgcttccatggccatggatgagtgggtcctgggggagagtgcccggttcacacagcctgctcttccaaacccacctccgggccagggtgcagggttgggggaaacacgctcttcctttggtttggaaactccctgcaggttgtgggtctggaaagggagaaagggggctctgaggcccagagggcctgtccgcttagggaggggtccactggcagccagaagcagctcagagcctgcccctccctccctccctcagggaccctggagccaggagatatggggtgtgcttctggccctttgctggctaccacctgaccacccctgacagccacaggactacctcagagggctggagaggacatggtacctggggagcgctgcttccttggtcccccttccaggctgccatggaaaggcccccgaggacagccccaggcacgggagctgatgggcacagacagggctgggaatccaggtctggggagtggaggagggcgtcctgcacttgcttattcatttaccatcgattttcatttactccctccttcaggcccagagacagacaggaggcaccagataacgaagacaaatcctcaaatcgatagagatgtggtcaccagcatcgaaatctcacagtccctgcactcgcttgaggagctccagatagaatgaaaggtggatggacggaagaagagatcggctccctccagagagaacgcgaagtgcgggggaccattcagggagagaggggcactcagtaagggcttcctggacgagctggaatttaaggatgggcataatttagacacaaaagctgaggctggggtgtgccaggcatcctggacagagaacaggaaaagcaaaggccaggcagtggactcctctggggccaggaccatcctgctggctcaggagaaaggccccaggctcaggcatacaggggacatggcctggtctgggttgggtgtggtctgcactgtcagggacagatgatggcttttggtttatgaaagaatgaaacacggcaagcctatgccccctgcccacgacttcactggggtgcaggacgtgctttcgggtgcatcctgactccagcctttctctccgtgtgtctctggggccttcactgttcttccacctcatctctttgtgcctcccttgttttttgttgttgttgttgttgtttttcatagagacagggtctcgctatgttgtccaggttggtctcgaactcctgggctccagggatccacccgccttggcctcccgaagtgctgggatcacaggcgtgagccatggcacctggcctcttgctgatgtttccaaactctccctctgcctctgaatttcttatcttcatttccctccgtatctgtgtctttgtgtgttcagagccttctagagtgtttcttggttcctccttctgtctatgccagctcctctcactctccaggatctgcctctctgcatctctgggcctccatctctgtctctccctccccaggtctctctgtcacatatcctcagggcactgctttcttggcctctgggtttgtgcctcaggttcccccacttgggctggaatctcactccctcaggcccatggggtctgtggtcagagcttaggtttggggtgggctgcctgctttgcctggaactcctgtctagcccaggagcaaccaaggtagggaggcctgcctgccccttcctgtgtgcaggccagggccctgctgcccacttctggaccaccagcgggaaatcagctgagccccacgtgcaaggccaggcctcacctgtgacggacagttggccctgggagagagctgagagctgacaggagccagggcggttatctcccaggcctttgctggaatcagatggggcagagaggcccagatttattcacttcacttagtccccgagacaggtgagcggctggagatggacgtgcttcactgcacgaggcagaggctagcatgggccaggcacacacgggagctctgcacaccaaaagcaagccagaggctggcccttgggggctgggccccactctcccagttcagctaagacaggggcaaggggcccgcagatgtcaccttgcagctggaattgaccaatcagccaaggttgtcattgggtctcgggcaaattagaggcgacagccatgctcctgacctccgtggtgtggctgatgagggccttctgctcttggaaatccacctctaagccagcgaggaggcccacgacaggcaggtgggctgctgggggaagaggtcgggtgtggcaggaaagcaacagcggctcatttgtgctcaggacatctgttctgggggcggcccctccattcatgcccctcatcactgagcttgtgtctggcttaaccaagagctccaaaggtcaaaacaaattcgtgtgtgtgagcttccgtttcaaaacacccgccaagcaagacgtggccgggcctctactcccctgagatttagggaaagggcagtttcctgactgctgcaggtgtttctctgcctttccatgctgagactacggtgcaaattatttgacctctccatgacttagtttcctattctgtaaaatgggacaacagtagcggccccgtcacaggttgttgggggatgacacgaaataacggagacgcacagcgcccaggacagcctgcaatgagcacccgtgtcatctatggcagctacagctgttgctgtttttatcggactcctcagcaccaagggccaaagcccatcccttttacctgcacagacagacaggcaaatggtacccaggcctcggctgaccctggcagaatggcagctgcctgagaagaccaaggccgactatcagtgtctctcccagcgggacccacggtggcctcgggcagtgcagcgtcacccccctcccctcgccctgtctcagctgggagggatgacattcattccccaagtgtctggctggaccagagccacagacacaactgtctatgacattgtttgattgtttattttcttgacccaaacagcagacctgcaccagggagatctgagtcagtggcttccaaggtgccacacagggcctgtggtgccgttctcaggtggttcaaagacaactccccccttccttgtctctaaacagtcctttccggcgtgtgtgtgtgtgtgtgtgtgtgtgtgtgtgtgtgtgtgtgtgtgtgtgtgtgtgtgttggcttctattagctttacatttcaaaaatcccaggtacttccagctccctgggactacagaatccatgcagggaggaaaatgaacagagatggggaaggtgataattaagcataagaggccttcctggggctaggacttgggaaggaagcttcagtcagttcatggcacttagtgagcgcttatcaaagcatagtggggatgctgggtgggtctgacgggatttcgtttgacagcatgtgcctgtctgtgtggcacgtgtgcgtgtgtgtgcagagggtggggccaacatggaaatggggctgggctttccagtagagcctgatctgagagctgccttaccagccactgctctaccccccgcctgaaattcctctgtaagtttcattcccttggatttagacctgtaagacacgaccgctgggagagaacagactctgtcccagcccctcatccattctactcatggggaaaccaacacctagagaggaaaaatgacttccaacgccaagactgtccggcccaggagtcccccaggaaaacaccagccctgtgggggctgggcctgtaagccctgctgatgaggtcacgttgggccacctccatgatcatggcagccactaggggcagggtcaaggggtcagggttaggagtacagtcacacagacgtgacctggtcatgcccctgcctcccactggccaggtgcaaaggtcagggagtgaagtgagctggacatgagggcccttcccttctgagagaagcatgcccatttttcttgcaacaggcacccctattggtctgtcttctttcttttcacagggatgtgaaacaagaacggtttcactttcttcttaaaaacactgcaacggtgatgctgaaagggtgtcagagacaacagggccgggtggggactgcagcgaaccacagaatgcaaccggggagcggctacttcccctgaccaacttccctgagcagggagcggctacttcccctgaccaactttcccccaagcggggagcggctacttaccctgaccaacttccctgagcagggagcggctacttaccctgaccaacttccccgagcagggagcggctacttaccctgaccaacttccccgagcagggagcggctacttaccctgaccaacttccccgagcagggagcggctacttaccctgaccaacttccccgagcagggagcggctacttaccctgaccaacttccctgagcagggagcggctacttaccctgaccaacttccctgagcagggagcggctacttaccctgaccaacttccctgagcagggagcggctacttaccctgaccaacttccctgagcagggagcggctacttaccctgaccaacttccctgagcagggagcggctacttaccctgaccaactttcccccaagcggggagcggctacttaccctgaccaacttccccgagcagggagcggctacttaccctgaccaacttccccgagcagggagcggctacttaccctgaccaacttccctgagcagggaggtatcggaagcccttctgacttccacaaaggaagccagagctccagtttttttaaaaatgagagttctccacatttaaactagttgacaatgaattttaagcagtaggccagattgaatcactgctccaccagtctgtgacccaaaacacaggcaaatgtgtggtcccagaggacagacggcacccacctcctgacagggaggcttcctactccattccgcctccttctgcaagctccagcccccccggccccggtgtgtacaacacacactcccagctgctctgaaggctgtggagaattcacgtaccgcggctggtatatgtgacagaaatggcaaatccagagtctgctagcaaaatacgggggtggggagtgggctgggggtgaggagaaggaggctgagcttccaaaatgcaaatctctcagggacagagagagaaggaaggcggcatagcagcagctggctctgggcggtcagcaatcctatctgaaaataaaacattttacaatccacaactgcacctcattaagaatgaatggatcggctggtataaatagcatgccacgtgaagaagtcaggaaacagcatatgcgtttgacggaaaaacggcagccacagggctgcttattagctcggtgggcggaggctcttcactcactaacaagacgggtcccgggttcaaagctggggtcggccgaggctctgcactaacaagacgggtgcagggttcaaagctggggtcagctgaggctctgcagtaacaagagggatcccgggttcaaagctggggtcggcggaggctccgcactaacaagacgggtccagggtccaaagctggggtcggccgaggctctacactaacaagacgggtcccgggttcaaagctggggtcggccgaggctctgcactaacaagacggatccagggttcaaagctggggtcggccgaggctctacactaacaagacaggtcccgggttcaaagctggggtcggccgaggctctgcagtaacaagagggatgcagggttcaaagctggggtcggccgaggctctgcactaacaagacggatccagggttcaaagctggggtcggcggaggctccacactaacaagacgggtcccgggttcaaagctggggtcggtggaggctccacactaacaagacggatcccgggttcaaagctggggtcggcggaggctccacactaacaagatggatccagggttcaaagctggggtcagcggaggctctacactaacaagacaggtcccgggttcaaagctggggtcagcggaggttccacactaacaagacggatccagggttcaaagctggggtcggcggaggctccgcactaacaagatggatcctgggttcaaagctggggtcggccgaggctctacactaacaagacaggtcccgggttcaaagctggggtcggccgaggctctgcagtaacaagagggatacagggttcaaagctggggtcggccgaggctccgcactaacaagacagatccagggttcaaagctggggtcggccaaggctctacactaacaagacgggtccatgggtcaaagctggggtcggcggtggctccgtactaacaagacgggggtcccaggttcaaagctggggtcggccacatggcttccctgatcttggagcacagaaggcctcacactgtgccagccctgctcccaacctgggcttaactctggacacacagtgccagcccacagtgagcttctcacagctcctgacccacaggacccccactctaatgtcctacctctgggcttgaatgctgccattgacagggagctcactcctccgtcagatgcaaaacactcagttctgtggctggatggctattgatcgaggaaacctaaatgtcccctgctgtggctattgatcaaggaaacctaaatgtcccctgccctgcctcagctctgctctgggtctgggagaagtggccttagctggccacgccatccgttatgtttgactatcggacactggccacgccatccgttatgtttgactatcggacacagaacagaaataattgggccaatcactttttctcccaagtatggacgtgaggtcctgagagcggggtgggggtggggcagatggttggcttggagggctggcaagctgcagagcgggcgtcgggagcacagagctggcacaagtagaagcagctcagccgccctgtctgtctcctcgcggcctcgccagccttcgtctcccgccctgattctgggagaaccttcctcagtggtctggcagcaacctctacctcgtgccagccttggtggtccctgatcctcacaaccaaaaatccccaacagtcggaaaagaaaaagccagtgagcgtcgagaactgagcgacagcctgacgctgcacggcttccgccacgggcggggcatgcgctgggttttggaagccgggatcctgggccctcttgggcacagcctggccgcctacaggaccctggtcagccttcccctcctcatccatcatcgacagtccattccaccgtctgtagctgccctggaggctgctctgagcatcagctgggttagcggccatgagtcacagagcgctggggctagtacagctcggagggactcagctcttcccggaagacaggtagagggcgtggggtgggggcggcaggatcactggggaagggcggccccggcaaacatttgcggcctgagctgaaccaggctgttcaacccacacagaaccctcaggcttgctttcacgccaccacaaaaaggaccacagtttggaatttgtaaaatctgtctaacatcaagtgagccactgaagtgatcgtgaaactcccatttttcttaaaactccccacctggaacaaatccaaaacctgtaagggaaccagtgtgtcaccctgttctggaacagaccttgaagggaaccggtgtgtcaccccgttcaaagccacccaggaggcctgcactcccctctggggaaggatggacggtggaaggcggcaggattcctgcagagaggcctgaggagggacaatgacccaggcctcagaggagaagggaaaaggaatttgcctcccagccggagctgcctgtgtcccagcctgggagctttttggttcctctctaagggcatggacgtgaggaggaaatgggtatttacaccctgtgagcagggcttttgatggtgctgggcaaagtggagaggcctccccaaatctggccaggccacagcccagtgacaaggctttcaatgataccccaggatcccaggccgaggtccacatggtaaaacttcatgaatccagaggtcctggcccccacctgagagccctctgaacactggcttcaggcccctggtgtcaggcgctcagtcacaattgagaaaggcaggcagaaatgacacagcaggccgggtgcggtggctcatgcctgtagtaccagaattttgggaggctgagccagacagatgacttgagcccaagagttcaagaccaggcctggacaacgtggaatcaccccgtctctacagatacaaaaaaattagcaggtgcggtggtacatggccagctacttgggaggcagaggtgggaggattgcttgagtccgggaagtcgtgtgcagttagctgagactgagccactgtactccactccagcctaggtgacagagtgaaaccctgagaaagaaagaaaagaaagaaagaagagagaaagagagagagagagaaagaaaggaaggaagagaaaggaagaggaaggaaggaaggagaaaagaaaagagggagggacagaaagagagagagaaagagaaaaagagagagagagaaagaaaagcaacaaaatgaaacgaaactccagaaagagagagagaaagagaaaaagagagagagagaaaagaaaagaaacgaaactccagggcagacctaggcagcggtgcctgcgggtcacagctctggaggttgaagagaagaagccgcatcctgttaactgtcctcggcgttggaggcagagaacaacgtccacctgagaatcgcttccgcgcgtagtgactccagccgcgcctttatcgttcttcctttctttacagtgacagctggaactgcagcacccatcttgtgaccatgagggaaagagaagaattgcaaagacatctgtcctgacatcactgaagctgctgaaccgaagccgtggctccttcctctgagcttcgtattttatgagaaaaagatgtactctttcgctactcaagtatgccatgttgatgtggctactttcacctcccacccccagcagctctctctctgtgcacagggtggaaatccagcttgaaggcaagaagcctgtggaggggatgaacccagctctaaaggtgttacaccccggggcccacagcaccggtgccgccatttacacctcatataccacaggggacctcagggaccaggccctatgcaaaagctgactttactgctgtcatatatgagcaatggtatgccaggaagagcaggggagagcacacactgtctgcagggatcaggtggagggggagagacatcgctcagaggcagaccctgtgaccaggtaccaagaggtactcaggccaggccgttccccaccccctcctggggaaagaaggaataccctgctgggacccaccaaggggtctgcaggcaactccttggccaaaatcaatacccagcgtccaggggagggagagagcagcaaactcaggtagtcagcgcacctgtcctgcaggtgcagtgcagtcactgggtctccctgagataacacagaggacaggaacacgtctactctttccctaatactttcattgtgttatttttaacatttcgatcttacctatctgcagtgtgtttctggatacacctagaaggagaaagaaatctaattgcaccagctccagttatgagataggtctgttagcttctcattaagttgaaaagtgacttatggttggcgtccatacattctcaggctaccctttctctactcttgtctattccactcgtctgtttattcctacaaataaatattctgtttatcctgatgccaatactatatcgttcttactgatttcagtaactttatagtaagctttaaaatttggctggatagttctttccactaccctcccgattctgttttgttttgttttgtttttttgagagataggggtctcactctttcacccaggctggagtgcagtggtgcagtctcagcttactgccgcttcaagctcctgggctcaagtgatcctcccaccttagcctcctgagtagctgggactacagctatgtgccaccacacctggctaagtcttacaaatttatttgtagagacagtgtctcgttacgttgcccaggctagtcttgaactcttgactcaagcaatcctcctgacttggcctcccaaaatgctgggattacaggcatgagccagtgtacccagcctacccttgctattagaaagagttttttggccaggtgcagtggctcacgcctctaatcctagcactttgggaggccaaggtggatggatcacctgatgtcaggagttcaagaccatcctgaccaacatggagaaaccccatctctactaaaaatacaaaattagcggggcgtggtggtgcaagcctgtaatcccagctactcaggaggctgaggcaggagaatcacttgaacccaggaggtggaggttgcagtgagctgagatcatgccattgcactccagcctgggcaacaagagtgaaactccatctcaaaaaaaaaaaaaaaggtttttttgttgtaagctattctccaccttatgaattttaaaaactgaaatataatttatataccataaaaggtaccctcagaaagtatacaagtcagtggtttttagtatagccatacgtttacgtaaccaccacgatctagtttcagaccatttgcatcagctctgtgtacccattagcagtcagtccccattcccctccccatcctccccaagccctggcaaccgcccatctactgtctgcctctgtgcactggcttgttcccaccggctcatatagatgagatcacacaacacgcggcctttcgtctccggcttcttccacttcgcatggtgttttcaaggctcatccaggctgcagcgtggatcagcactttcttcctatgactgaataacgttccactgtgtgattacaccatattttatccattcatcagctgatggacgtatgagttgttgccactttttggttataatacttctgtgaacaattgtgtccttatgaatatttaaaaatcgtcttcggccgggcacggtggctcatgcctgtaatcccagcaatttgggaggccaaggcgggaggatcacgaggtcaggagatcgagaccagcctggccaacacggtgaaccctgtctctactaaacatacaaaaaatgagctcggcgtgtagcgggcgcctgtagtcccagctactcaggaggctgaggcaggagaattgcttgaacccaggaggcagaggttgcagtgagccgagattgtgccactgcactccagcctggcgacagagtgagactccatctcaataataataataataataataataataataataataataataatcttgttggccaaggatggtggctcatgcctgtaattccagcactttggaaggccaaggtgggtggacagcttgagctcaggactttgagaccagcctggacaacacagtgaggctcccatctctacaaaatatacgaatttaaaagtttggtaggtgcagtggtgtgcacctgtagtcccagctactggggaggctgaggtaggaggatcacgtgagcccaggaggtcaaggctgcagcgagccatgattgtgccacggcactccatcctgggtgacagagcaataccctgtctctaaaattaaaaaagtaaaaaaacctagaaattgatttgaatgtccatcgataggtgattaattataatacactatattgtgagattttactcagccatgaaaatgaataatgtaaaatctgtatccgttggcctggagggatgctcctgatactcttttaagtgaaaaaagcaccatgcagagtgttgggtaagagcctatttttattgctaaaacaaaagccaaaaaaaccccacccctttatcaagtatatgtttgtaggaacacagagaaagggtttggagatgagggtaagtagaagagatgtttctttttctttttttttctttttttttttttttgagacggagtcttgctctttctctttttcacacacctttgaattaactcgctaaaatatatcttgtattcttatgtaattaaaaattaacaaagaaaggactggcatggtggctcatgctggtaatccccgcactttgggaggccgaggcaggtgaattgtttgaggccaaggggtttgaggctagcctggccaatatggcgaaaccccgtctctactaaaaatacaaaaattagccaggtttggtggtatatgcctgtaatcccagctattcaggaggctaagacttgagaattgcttgaatccaaaaggcggaggttgcagtgagcagagatcacaccaccacactccagcctgggtggcagagcaagactgtctcaataaaaaaaagaaaaaaattaacaaaaaaactttaaaggaggaagaaaaaggaacccacctcagaaacatcaaccctttcacctgattgctctgtgggttgaaaagttcatgacttgtagtatctattcatgattaccttcctctattgattaccttcctctattgactaccttcctctattgattaccttcctctattgactaccttcctctattgactaccttcctctattgactaccttcctctattgactaccttcctctattgactaccttcctctattgactaccttcctctattgactaccttcctctattgactaccttcctctattgactaccttcctctattgactaccttcctctattgactaccttcctctattgactaccttcctctattgactaccttcctctattgactaccttcctctattgattaccttcctctattgactaccttcctctattgactaccttcctctattgattacccttcctctattgattaccttcctctattgattacccttcctctattgactaccttcctctattgactaccttcctctattgattaccttcctctattgattaccttcctctattgactaccttcctctattgattaccttcctctattgattaccttcctctattgactaccttcctctaatgactaccttcctctattgattaccttcctctattgattacccttcctctattgattaccttcctctattgattacccttcctctattgactaccttcctctattgactaccttcctctattgattacccttcctctattgactaccttcctctattgactaccttcctctattgactaccttcctctattgaataccttcctctattgaataccttcctctattgaataccttcctctattgaataccatcctctattgattacccttcctctattgattaccttcctctattgattacctttcctctactgattaccttcctctactgattgcccctcctctactgattgcccctcctctattgattaccttcctctattgattacccttcctctattgattaccttcctctattgactaccttcctctattgactaccttcctctattgattacctttctctattgattacccttcctctattgattaccttcctctattgattacctttcctctactgattaccttcctctactgattgcccctcctctactgattacccttcctctattgattacccttcctctattgattaccttcctctattgactaccttcctctattgattacccttcctctattgattaccttcctctattgattaccttcctctattgactaccttcctctattgactaccttcctctattgattaccttcctctattgattacctttcctctattgattaccttcctctactgattgcccctcctctactgattacccttcctctattgattacccttcctctattgattaccttcctctattgattacccttcctctattgattacccttcctctattgactaccttcctctattgactaccttcctctattgactaccttcctctattgattacccttcctctattgattaccttcctctattgattacccttcctctattgactaccttcctctattgattacccttcctctactgattgcccctctactgattacccttcctctattgattaccttcctctgattaccttcctctactgattacacttcctctactgattacacttcctctattaccttcctctattgattaccttcctctactgattacccttcctctactgattacccttcctctactgattaccttcctctattgattacccttcctctattgattacccttcctctattgattaccttcctctattactttcctctattgattacccttcctctattgatcaccttcctctattgatcacctttctctattgattacccctctattgattacccttcctctattgattatcttcctctattgattacccttcctctattgattcccttcctctattgattacccttcctctattgatcaccttcctctattgattacccttcctctattgattaccttcctctattgattaccttcctctattgattacccttcctctattgattacccttcctcttccaacagggcatgagaaagaaaatagggtggcctgggatgcagggagaagaagttgggagctacaggtgcatgagcctaagagatgtgggatgtagggagagggagagagggagagaagggaagagaatggggggggagagggagagaaagaactggaggtgggcaaagaggcttagagagaggctgagagagcgagcaagctggtgctgtgatcagctccaagccagtgaaagggactgtggggcaggaagaagatgctggccccggggccctcggaggcagggtcccaggaggagcagcgtctggtgagagcagggtggttttcacagcctccgagtatctcctgggactttccagcagaccccaatccagaggatccacactctactgcaagagcatggggccactgccctcctcgcccatgaaattaaaaggccatcttttaattaattaaaaggccaagtctgcgtgcctgaggaagtgaggggggctctgctcctccccagggtgtgcgcatgtgcatgggagtatgtgtgcgtgtgggcaaccgtgtgtgtgcatatgagtgcgagtgtgtgtgcgtgtgaatcagcatgtaagctactgtgtgcatgagtgtaacgctagtgtgtgtacatgcatgtgtgtgtgagcttgtgtgtctgcatgtgagcaagtgtgtatgcatgtggatatgagtgtgtgtatgtggatgtgtgtgtggatgtgagcactatgtgtgcatgtggatgtgtgtgcataaatgtgcatgcgcaagtgtgtgtagacgtgtgtgtacatgtggatgtgtgtgtggatgtgtgtgtccatgtggatgtgtgtgtgcacatggatgtgtctgtgtgtacgtggatgtctgtgtgtgtggatgtgagcgtgtgtgtccatgtggatgtgtgtgtgcgtgtggatgagagcatgtgtgtgtgcacgtggatgtcagtgtgtgtgtacgtgggtgtgtgtgtggatgtgtgtgtggatgtggatgtcagtgtgtgtgtgtggatgtgagtgtgtatgtggatgtcagtgtgtgtgtgtggatgtcagtgtgtgtgtggatatcagtgtgtgtgtgtgcatggtgatgtgtgtgtaggtgtgagcgtgtgtcaatgcggttgtgtttgtgtgcgtggatgtgagtgtgtgtgtatgccctgacttggagcagacggggcagtggcagctcttgaagtggggcataggccacagctgcccccataggccttcagcctctccggctcaactggctccaagcagcattttaaacccacaggtgtccaccagcttctgctcccactgtctgagggacatggacagatctcgagggctcagcaggagaaggtctgaggtccaagggtggcagagggaccaggtggaggaccgccacttctccagccaatctcgggccactcagttccaggctgggcagccacagtgcccctcaggccagtgtcccagccaggcctgcaccccctcctcctgagggactccccgcctgcacggtctccactgcattgcatcccacggtccccaccaatgtctgtccgtggcagcgatgtcgggggtgaactcataggcagcagaggtgtacgcagcatccggtaggaccagcgaggagaggctgctatgagggagtcggggtgctgaggacaaagtgcctgcaggctgcacaccaaggcacagatgccgacctacctggcaggtccacgtatgggggatttataccttctacatacgtcactggacaactttcacatgttcgtaataaacatgcattacttttgtaacaagaaaaaacagcccgaatgacataaagatggtcagatgtcaggtcacaaccgaagaccaggatgtcgcaaagcccctgagaagcggccgccaggtctattgtgatgggtccacttcctccaagacgagccatgatccgaacgagcctccctcacccctctgcctgccgtctcatctaagaccctcagaccctgagtatttggcagaaacgtgagcacttcagagcaaaaggacccagatgccagagagggtaagagcctgcccttggatcccagctcggccacacacctgccgaggaagtccctcctcttctctgagccgcaggtacacccatctataaaatgcagtcattaaataacttccgagcctgttgtgagaccaggaactttgaaataaaaccacaaacatcaaagcatcatgaaagctgcggagaacggtccacaaccaggcgcccccatcgttgccaagtggggcggccacctgagacacacacaccttactgtagccaccagaacgcccagggacactgggatacaaagtcaccatacttattaggaccagggaagccaggagtcctcccttaccgagacacaaggcaagtgccaggaagagatggtgagggcctgcctgggaaagatgtaggttttatactttgcaaaataccttaattgacgtcccatttctgtgaagatgcgtagtgctgctcatggcatccttgcccccagagcagtacttgtatgtgatactgccccccgtgggccctcccgccgcactcctgcacagagcgaacagtcacctgctggaggtccccgctgctcactcgggagaaggtgtggagctgagggcacagggagggacgcatcaccagaatgagcctcgtggatggagggtgcgggggactggccttgtgcctgcaaactgccgggctggctaatgacccaaactttacaggccatcctgggagagaggcagaggggacttacctcttcctcgggcccacgtgtagatgcggctggtctcagagcttctgggctctcgctctgccggttccgtgggcaaaggtcggaagtgggggtcatcagctcggccaggggtcttcaggggcaagatatacttggggagccctttgtagaaccaggcccccgacctcttccagacctgagtgggggaagagagctgcttggggcacaggacgcagaggagcctcccctcctgctccttgcccagatgacgggaggcaggacgcggagagctaggagcagagtgggagtgggaactctggctctgccctccctggctgatgggctgggctgtcagttaccttcccaggactcaggacatgaactctccaaaccttctttctctcccttattttagagttgaggacttgctctgctgcccaggctggagtgcagtggtgcagtcatcacccgctgcagcctccacctcctgggctcacgcggtcctcctgcctcagtctcctcagcagctgggactactgtacctgggtctacacctgctttaaagacaagcccatgtcctcctgcttctctcttgcagagcagggatctcaatatgggcctggcatgtgagacatgtttatgaaaaccgtcctctgttaccgtctgtatccaccactcggatcctagagattgcctagtcagacctctgcccatccccagtcctttccggcccctgctggaaaactcctagtgacaggaagcccacaagccaccaggcactgctgagtttccactagatctgccagtgactggcacttccttcccgccagctgacctcccgggcaccttctctcgctggcccaaggcagagggctgcacgggacagactctcccagccacaagtacctgcaggcacctcacccagcccccaagctctcctccctgccagctgacctcccgggcaccttctcttgctggcccaaggcagagagctgcatgggatggactctcccagccacgtgtacctgcagacacctcctcctgcccccagctctccttggtgccatgcccagatccccagcttctcaaggacaacaccctgattcctcagctgtcccaagtcccctctcatcgagccaccccctcttgccatgtttgtcactgcccctcgggagaggggctcagaagtggccacaaagctccagacttgttctggctgcccccatggcacagccactggctttccaccctctttcctgcctcagttctatcctccttgcatcctgagcctcccaggagcccctcttgaccctatgtagtcccccagggactctgagagccaggtgggtcagagggggcctgccagggcccaagcaggtgtaaagcatccctttatcactgccctggggaagtggtgagagtcaccctaaagctggccagacagacacccccaaaggctggcagagccccaggaatccagggatgcccaccctgaactcacagggtgggaggtgctctgggtctgggacgcacagccccttgggctctgaggggtccctctgttcctctaatatccccagcttggacacccaggctccccactcctgctgtccctggaagcaaggctgaatcaatggcagcttccacatgctcgctgtgtggctttgagtgagttacttaacctctctgagcctgagtttctttattgattaaattgatgaaacatgatagctgctgagaaagttggaagtactcaacagagcaaagggcacccagaaggtgttcacaagatgccacctgcctgcctccttcctgtcccttccgctcgaggctccagggcgaagcaaccgaggctgagggagagccaggctggaccacatcacagccttggaagctcttctctgaggacttctcagatgggacagcctctccaacaggaacagaaaggaccgcctcttggagagagccaccgattagaattcagagcagctgctgagttaaggtccctaaatttgtaatgcctccttcagaaaacaccacatactgtatagcctcttttctgatgaaggaaataaattcagggtatttagtcaggaggggtgggagcctgtaaacgaacactttgcaaaaacctcaactgacatgacccttctcagagaagggcaggccaaggttccgagccgacgtcctgaatctgaatcctgggtctggcacccagcatctggtgtgatttggacacgctgacctccctggccctcagtttcttcatcagtaggcaaacacaggagcagggcttatctcaccgggaggacttgaggatcaggcccaagaatgaacgtgaagcctcaagggccagtgccaggcacggagcagcctctccacagaggagaggcccatgggcaccaccgccacccccctcctgccacctggcaaacacaaacagctttatcaccagtgggccaattccctactggaagaattcaaaaccagaagaccagaatccacctgattctgagacattgcttcccaccccgcaaacttcctctgcatcacattagtactgtgggatactaacaagagtcaagccaaaaaaaaaaaaaaaaggtttctaatcacatactcttgaaaagcactaggttaaaccaagctccatcgctgcgggacgtctcagagcctttactaagctccatcactgcgggacatctcagagcctttatttactaagctccatcactgcgggacctctcggggcctttaccaagctccgtcgctgcaggacctctcagaccctttactaagctccgtcactgtgggacctctcagagcctttactaagctccgtcgctgcgggacctctcagagcctttactaagctccgtcgctgcaggacctctcggagcctttactaagctccatcgctgcgggacctctcggagcctttactaaggtccatcactgcgggacctctgggagcctttactaaggtccatcactgcgggacctctcagagcctttactaagctccatcgctgcgggacctctcggagcctttactaagctccatcgctgcgggacctctcagagcctttactaagctccatcgctgcgggacctctcagagcctaagctctgtcgctgcgggacctctcagagcctttaccaagctccgtcgctgcgggacctctcagagcctttaccaagctccgttgctgcgggacctctcagagcctttaccaagctccgtcgctgcgggacctctcagagcctttaccaagctccgtcgctgcgggacctctcagagcctaagctccgtcgctgcgggacctctcagagcctttactaagctccgtcactgcgggacctcttagagcctaagtgccatcgctgtgggacctctcggggcctttaccaagctccgtcgctgcaggacctctcagagcctttactaagctccatcgctgtgggacttctcagagtctttactaagctctatcactgcgggacctctcagggcctttactaagctccctcgctgcgggacctctcagagcctttactaagctccatcgctgcgggacctctcagagcctttaccaagctccgccactgcgggacctctcagagcctttactaagcttcatccctgtgggacctctcagagcctttaccaagctctgccactgcgggacctctcagagcctttactaaactccatcactgcgggacctctcggagcctttaccaagctccatcactgcaggacctctcagagcctaagctccgtcgctgtgggacctctcagagcctaagcgccatcgctgcaggacctctcagagcctttactaagctcaggtgcacagggttatcccagagggcaaaagaacacaccgtgctctctacccgcaatctgcctggatggttttcctagagaaactagaccttagtaatgggtctgcatggactcggcacttaactgggcagggcacctccttatgctcacagtgccaggcacggactgccacgtccagactaggtccctggcatgaatccctcactgccccttccagccaccctgtgtgaagggcctgcttttgtgtcgttcttgaacggcctggaacctgtctggtgggatgggtgcttcatggcacccgctttggaaaaccctttctgatcctcttggagccttcctacaacacgtatttatttgaatgggtaatgcaggcacatggtctaaaaatccacaaagtgcaaaagtagccagtctcctcccccattcccagaagcatcgaagaagcttattatctccacttttcaggtggggaaactgaggctccaacaagttcagcaatttccccaaagccagcacacccctctgttggcctctactccacacggaaggccccagagtctcacccaacagtttacagatgcaaagcagatgctcactaaactgcagttgagtggtgaataaatcctcagtggctcagacgtctgtgtggacccttagtgtcctacaggcaggacaccagagtggagaggactgcctgacaggaggaagcagcaaacacacagcagccaccaaggccaccccatctctgaagagctgctgcaaggctcattagagcaggtacccaagtccaaaaggccacgggggccatggggtgccagccaagggctcgctacgcctccctctgatgagcgaaagctctgctcatcctgccctgagcacgtcacctccctgtcctccaccgtgggctgggcctgggggaccccaaatgaagcagacccctaagaaccatctgtgaacggcggggcccgtgcaggctttgaaccgcacgccacactgtctcccccacccgccttggaagttttctcttttttttttacttttttttttttttgagacagggtcttgctctgtcacccaggacggagtgcagtggagcaatcggctcactgcagccttcacctgcccaggctcaggtgatcctcccacctcaccctcccgagtagctgggactataggtggtgtgcgccaatacacccagctaatttttgtattttttgtagagatggggttttaccatgttactcaggctggtctctaactcctgggctcaagcaatctgcccacctctgcctcccaaagtgctgggattacaaacacgagccaccacgcctagcctctccctttttttattttcctgaaaaatacatacctagcatacaaaattagcacaacaaaaaagtaaaatgaaactaggccacctataacatcactgcacagagacgccctgctgaccatggcggtgtgaattttcttacaccattgcctgggaaaacacactatttgttttttgtttttttgaaaactaggctaatgtagatgcaacctgttcccaccctgtcccccaacacctcactacgcatcagagcagtcgttccgaactcataacttctccatcatcgtttttcactgctccacagtttggatttattaaacttaagtaatccagcacctcaccgagggacatttgtttccaatcctcgtcctcacgggcagcgccgcagccatcaccccgcacccaccccatcagcccagtgctcggttattgccttaggaaagacgggttgattttgcccttttccaaaatgcttgggacagaagtgcttcagattttgaatttttccgaattttagaatatttgcattatacttaaccagttcagcatcccaaatctgaaaatccaaaatctgaaatgctccagtgagttttggattttggagcatttcagctttgggttttctgatgaatgatactcagcctatattccacagagcgggactgcagggtcgagaactgtgtgtttggatgatgacatagagtcaggccgccctccaggaggaaaagccacattcccaggaggctacagtaagtgtttttggggtggggacctcggcttacacttcctggtggaatccaaggcctcctctgtggaccctgatcggggaaggttcccagggaaccacggtgggcttggggagaggcatccatcagggcatgaggccaccagagtgaggggcgtggggcgaacaatggagctaccctgccatccctaggacaggccttgggggctgagagtgctcccccacctcacgcccagccagtcaaggccctgtttaacggggagtggccaggttgatgctcagggtgacttggcaatgtggccaagccatctctgtcgtgagtcttcaggggaagagactaagacaccccacagagctgcattcccgcacactgtggggccgagaacctcatctgtgccagtgagtcctcagctcatggacttccgagctgctcctttgcggcaccggaccacggttttggcctccgggtatgcgcaatccttttttaaaaaaattaaaaatgtttccattgtattaaagtattcataacatcaaacgtatcacctgaagtgcaacccatctccagaacttgccaaactgaaactctataaccactaagcaatagctctcctctgccctggcccctggccaccccagtctgctgtctgtccctaggaacgttactaccctacgtacttcctatgaggggagccgcacggcgtctgtccttttccatccctaggaacgtgactaccctacgtacttcctatgaggggagccgcacggcgtctgtccttttccatccctaggaacgtgactaccctacgtacttcctatgaggggagccgcacggcgtctgtcctgttccatccctaggaatgtgactaccctacgtacttcctatgaggggagccgcacggcgtctgtccttttccatccctaggaacgtgactaccctacgtacttcctatgaggggagctgcacggcgtctgtccttttccgtccctaggaatgtgactaccctacgtacttcctatgaggggagccgcatggcgtctgtcctgttccatccctaggaacgtgactaccctacgtacttcctatgaggggagccgcacggcgtctgtccttttccatccctaggaatgtgactaccctacgtacttcctatgaggggagctgcacggcgtctgtccttttccatccctaggaatatgactaccctacgtacttcctatgaggggagccgcatggcgtctgtcctgttccatccctaggaacgtgactaccctacgtacttcctatgaggggagccgcacggcgtctgtccttttccatccctaggaatgtgactaccctacgtacttcctatgaggggagctgcacggcgtctgtcctgttccatccctaggaacgtgactaccctacgtacttcctatgaggggagccgcacggcgtctgtccttttccgtccctaggaatatgactaccctacgtacttcctatgaggggagctgcacggcgtctgtccttttccatccctaggaatgtgactacccaacgtacttcctatgaggggagccgcacggcgtctgtccttttccatccctaggaacgtgactaccctacgtacttcctatgaggggagccgcacggcgtctgtccttttccatccctaggaacgtgactaccctacgtacttcctatgaggggagccgcacggcgtctgtccttttccatccctaggaatgtgactaccctacgtacttcctatgaggggagccgcacggcgtctgtccttttccatccctaggaatgtgactaccctacgtacttcctatgaggggagccgcacggcgtctgtcctgttccatccctaggaatgtgactaccctacgtacttcctatgaggggagccgcacggcgtctgtccttttccatccctaggaacgtgactaccctacgtacttcctatgaggggagccgcacggcgtctgtccttttccatccctaggaacgtgactaccctacgtacttcctatgaggggagctgcacggcgtctgtccttttccgtccctaggaatgtgactaccctacgtacttcctatgaggggagccgcatggcgtctgtcctgttccatccctaggaacgtgactaccctacgtacttcctatgaggggagccgcacggcgtctgtccttttccatccctaggaatgtgactaccctacgtacttcctatgaggggagctgcacggcgtctgtccttttccatccctaggaatatgactaccctacgtacttcctatgaggggagccgcatggcgtctgtcctgttccatccctaggaacgtgactaccctacgtacttcctatgaggggagccgcacggcgtctgtccttttccatccctaggaacgtgactaccctacgtacttcctatgaggggagctgcacggcgtctgtcctgttccatccctaggaatgtgactacccaacgtacttcctatgaggggagccgcacggcgtctgtccttttccatccctaggaacgtgactaccctacgtacttcctatgaggggagccgcacggcgtctgtccttttccatccctaggaacgtgactaccctacgtacttcctatgaggggagctgcacggcgtctgtccttttccatccctaggaacgtgactaccctacgtacttcctatgaggggagctgcacggcgtctgtcctgttccatccctaggaatgtgactaccctacgtacttcctatgaggggagccgcacggcgtctgtccttttccatccctaggaacgtgactaccctacgtacttcctatgaggggagccgcacggcgtctgtcctgttccgtccctaggaatgtgactaccctacgtacttcctatgaggggagccgcacggcgtctgtccttttccatccctaggaatatgactaccctacgtacttcctatgaggggagctgcacggtgtctgtccttttccatccctaggaacgtgactaccctacgtacttcctatgaggggagccgcacggcgtctgtccttttccatccctaggaacgtgactaccctacgtacttcctatgaggggagccgcacggcgtctgtccttttccatccctaggaatatgactaccctacgtacttcctatgaggggagctgcacggcgtctgtccttttccgtccctaggaacgtgactaccctacgtacttcctatgaggggagccgcacggcgtctgtccttttccatccctaggaacgtgactaccctacgtacttcctatgaggggagccgcacggcgtctgtccttttccatccctaggaacgtgactaccctacgtacttcctatgaggggagccgcacggcgtctgtccttttccatccctaggaatgtgactaccctacgtacttcctatgaggggagccgcacggcgtctgtccttttccatccctaggaatgtgactaccctacgtacttcctatgaggggagccgcacggcgtctgtcctgttccatccctaggaatgtgactaccctacgtacttcctatgaggggagccgcacggcgtctgtcctgttccatccctaggaacgtgactaccctacgtacttcctatgaggggagccgcacggcgtctgtccttttccatccctaggaacgtgactaccctacgtacttcctatgaggggagccgcacggcgtctgtccttttccatccctaggaatgtgactaccctacgtacttcctatgaggggagccgcacggcgtctgtccttttccatccctaggaatgtgactaccctacgtacttcctatgaggggagccgcacggcgtctgtccttttccatccctaggaacgtgactaccctacgtacttcctatgaggggagccgcacggcgtctgtccttttccatccctaggaacgtgactaccctacgtacttcctatgaggggagccgcacggcgtctgtccttttccatccctaggaatgtgactaccctacgtacttcctatgaggggagccgcacggcgtctgtccttttccatccctaggaacgtgactaccctacgtacttcctatgaggggagccgcacggcgtctgtccttttccgtccctaggaatgtgactaccctacgtacttcctatgaggggagccgcacggtgtctgtccttttccatccctaggaatgtgactaccctacgtacttcctatgaggggagccgcacggcgtctgtccttttccatccctaggaacgtgactaccctacgtacttcctatgaggggagccgcacggcgtctgtccttttccatccctaggaacgtgactaccctacgtacttcctatgaggggagctgcacggcgtctgtccttttccatccctaggaacgtgactaccctacgtacttcctatgaggggagctgcacggcgtctgtccttttccatccctaggaacgtgactaccctacgtacttcctatgaggggagccgcacggcgtctgtccttttccgtccctaggaatgtgactaccctacgtacttcctatgaggggagctgcacggcgtctgtccttttccatccctaggaatatgactaccctacgtacttcctatgaggggagccgcacggcgtctgtccttttccgtccctaggaatgtgactaccctacgtacttcctatgaggggagccgcacggtgtctgtccttttccgtccctaggaatgtgactaccctacgtacttcctatgaggggagccgcacggtgtctgtcctgttctgtccctaggaatgtgactaccctacgtacttcctatgaggggagccgcacggtgtctgtcctgttctgtccctaggaatgtgactaccctacgtacttcctatgaggggagtcgcacggcgtctatccttttccatccctaggaatgtgactaccctacgtacttcctatgaggggagccgcacggcatctgtccttttttggctgcttatttccctcagcatcacttcttcagggctcacgcacgcagcaacccgtgtcagcacgtccttcctttctgaggctgagcaatgttcccctgtacggatggatcacgttttgtcgtctgttcataggtacgtggggtgcttcccccttttcgctggtccttctgttttcatctgtctcccccaccaggctccaccaaacaggaggaagcatcacagccgtcttgctcaccactgtttcttcaagctcctagcacacgcctcacacatcgtaggtgttcagtaaacgctggttgaatgactgtgctggcagctgcgggtcgtttgctgcaacgtgtctcaacctacagtctgccaccttcccggggaagaagcctgggtgtttcactcaagttcctgtaattaatcaaacggacttcctatttcagattaaaagagggataaagaggaagggcttgatggggtgtgctggtggggaggaaagcgcagtgagcctccctgactgcccagggtgctcccagcctctcctccccagctgccctgcctcccctggcatatcccagcccccggcccgtgcctcagccttgcctcctgctgcaaaaatccgtctcccacccccactccactcaattcctgctcagtgacgttcttttggaagacagatgaagagcacaggacccaaagcatcaggttggattgccattggtactcagccattttgggatagtcaacccgtttttttttttttttttttttgagacagggtctcactctgttgcccaggctggagtgcaatggcacgatcatggctcactgcagccttgacaccctgggctcaagtgatcctcccacctcaacctcccgagtagccaggaccacagcaacacgccaccatgcccggcgaagtcaaccacttttgaactatcaaaaaagcccgtcaacttcatacgattcaccccaatatttatgcccagaaggggcaataatcccacaggccaggcaggccacgtgcctccccggggctctgtgggcaggaccatgagcacccgatggatcattccctgtgagttcattgtaacggggcctcgctccgattctctcctgctgtcactgtagtccaggtggaaggtctaagagctcaccctgaccatccagcatggctggtgatctggaccagcgtgaggagcagcagttcctaagtcccagcatcaggggaccacagcacacaggtgtatcatccagtacaggaggtgcacccatgcagatgtgcataaaacacactgtcagtatttctgaaaatgccttccgcaggggagagcagatctgttgaggtgaggtgcaaaggaccccacacccacaggccttctctctcctggctgcccgccccactctgcaaaacacaccacggcagccttaatcacgtaacttctgctctgtgcatctgggcctgtcacccgctgcctggcatccacatctacccctccccgcccaggaatagtggcaggaaaagccctcatgggaattaaccccaggccaccccgcagattgaaaatcagttactttctggagaagccgagcaactctgcaaaaccctactcggctccccacgtgtggtttgctgtgataaggccggcaaagcagccagccttgaaaatgccatttaatgagaaaagacccacagccgccgtggcggtggccggggtgtccggcagcagtaaacgctcctggtaccgctgctcgccctgctctgtgctccgcttccaggtttgcattacggtttcagctcacggccaatctgactgcagattctcatggatattcgccaagctgttcccagggaattttaattaccatgataacaattgctaatcactggcatttcctaaatggttgtggctggagaaggtggtaattgtcaggctggtgctggaaagaaggggagtctcacagacctgccactggagggggtgggacaggggagcctgaagacccctctctctgtccattgtccaccccttccatgtgtcactccctctcccgtgccaccctgagagtgcacctggcttgagctcttcactggcccaggcatccatcctctctgccccaaccccacgagtcacagcaggggacggtctgtggcctgtgcacctgctgttccttccccctggagtgcctttcatcagcatctctaacaggcagtcacgcttccccggagggcttcagtgggtgccccttcatgcagaatcagggcccctctgtcgtgctcccagaggccatgtggtcccactggtacagcacgccacacctgggctggagctcagactcgcccaccttcctgagcaggaggctgtgagctcttcaagggcagggctgtgcctgagccatctctggattcccgggacccagtgaggagcctgctatgttactgaccgaccacatgaacaaagaagggaaagcagaggcactgtctccaggggacagaggggagacctcgccttcaagggagactgcgttctgtctgcctaacaagctccagactgaatcagtcttggagaaccacgggaaaagacctgtgactgagcggtcttctcaattacactgcagctactttaaaggtctcttcaagggtcaaccctctctggcagaggagaggcagtacctctccctcctccattacctgacacacactcacaatgctggtctcccaggaaccctaagaggcaagttaaacaagtccgcagcaggccaacaacaccccaggacccagcctccctctcagcctcacctctcacctcccccacccccatcaccaggcacagctgctctcaccgccttgaccacactaagctctccttttggacacgttgttccttctcccttccctggactagctcgtctccagcctttgggaaatcacttttatccagaagcttccagacataatcttgcatgtttccacagctatgcacactccctgggttatgatcacctgtttctgtgtctgtttcctgaggatggaagaccccatgatggcgggagccaggcagagtgcccggcaggtgccagcacacagcagatacccaacaaatagtcagctgaacacccatccaaattgcaaggcttaagtaactcaagttacttaggagaagcacaggctcctcgagggtgctgggggctgaactgtgtcctccaaatccacatgttgaagctctaaccctcatgtacttgtgagtgacaatggaccttgggaagggaattaggtttagatgaggccatgagggtgatcgctgcccttatgaagagagagacaccaggagaatgtgcttcctctctctctctgccatgtgagggcacagcgggaacacagccagctgcaagccagaaagagagccttcaccagggatccgaattcaccagggatctggatcagccagccccttgatcttggacttccctgtccccagagctctgagaaacaaattcccactgtttacaccactcagtctatggtatgttgttatggtggctcaagttgactaccatggaaaagataggccagctataaggaaaccagacccagaatcgcattagacttatcactggtaacagtggccgcccaaagactctggatctagaattctatcagccaaactatcaacacaatgggagggcagaacacagatgtttttaaactcataaggacgctgagtttcccttacacacactctttttaagaacttaggacgggttccagaaaaacacaagtgaaaaacaagaaagggaaaacacaggatcctggaaacagtctccaactcaaaaggtgagctgaggggaagttcccggaaggcagcgctcaggaactactctggggtctggagggcgtctcacaggaaaacagaaggctccacacgatagatggtaaaataaaaaagctgcataaaagaggatgtaaagtttcattattctgttgtcaataagaaacacagtcaataaaaactccaggaaaaacgaaaagttacacaagaacatcatggtccaaatattgggtaaattaaaatatgacagggatgaagaaattcagagttaaaaaggaatgtttgctcagaatggtgggaacattctccttggggtggtctaggggtcaaggtcgttataaaaatgtgatcctcacatacgtttgagcctaagacgtttcatgtttacagttttttttttagatggtgtctcgctctgtcacccaggctggagtgcagcggcacaatctcggctcactgcaacctccgcctcccgggttcaagcaattctgcctcagcctcctgagtagctgggattacaggcacccgccaccaggcccggctaatttttgtatttttagtagagacggggtttcaccatgttcgccgggctggtcttgaactgctgacctcgtgatccacccgcctcggcctcccaaagtgctgggattacaggcgtgagccaccgcacccggccaacaaaataatttttacaatgtaaatcccagccaggtgcagcggctcacgctcataatcccaaccctttgggaggccgaggtgggaggatcgcttgaggccaggaattcaaggccagcctggccaagctgtttacatctcccctgtgacccagctcttgcaggcgtgcaaaagtcaagcgacaaaccatcaaacgaatcctaagcccatgccccgagccatctcctttatctaacgcccacacaccaagccaatattccccctgccctaaatcagtggagagtcagggagcacacaactagggacagcccctatgccacaaagcctgcagggttattcagtccgaccccactttgctttccccgcagaagccccagtaaaggctgtggatgtgttttcccctctcctctgcccacgactggctctggtgcttccccacgtggccctgcccgacatggtggtcccctcctctcaggaactgtgagcaagaaattcttccaatgacattagcctctttgtgtcatcactctgccacgtgcatgaagacctgggcacaaatcataaagcatggaagaattcattatagctaaagaacagaatctacatgtaaattctggcaatctacaactaaagataccatctagacaaggagggaggtgggcatgggggaggaagaggcggcctccatatccacagctcacacacagggagtcaagggtaccaaagctgacggaagaagacagaggaaaatattatacaaagtcacaaacttaatcaaagagccgaaagtaataacacaacgatcaacatcaggggacagaggggaagcagaggagtccaagctggccagctcctcatcttgcatggccaggagtcaatagagagtctcccaagttggtacatcaagaaaggcacggcaggatccagcacgtggacgaacaggcagcagcgggtgacgcggtggcaaggagccgccgggcgactgccgttccccaacgttagctcttccgaacaatttgattttttaaaaccatatgatgtgttactttgattaaaattaaaatgtaacagattggtaattggatgctgatattattaaatcctcggtctgcacggtaggtcgactcgtggggagctggcacagtctgtggctggcacactgaatctggatgtggcttaagggaggaaagctggtagctcaggaaaggaaaggaatgcagtaagtaaaatttcctgccatggaagagactttgtgaagttacggttagtttgagaacgtcggtatgagttggtaacacaccgacactcccgtccctgaagaaggccaagttccttcccacacatcactgcacccacctaaccgcccggagtcggaattgtggccgtgggcacctcgacgggttttcaagggggaaccaaagtttcactgcagacgggcaggcagagctgggtccagcaggaaacaagggcctgagggtatcgtgctgttagcggacgcgatgctgctttccaagatggctgggcggggatctctgatcagatttcaaagccacgattttggccgcgtgcgacaagccggactctccaagagccttggacccacaccgatactgaacaagctcagcaaacgtgaggtgtactgaggtaacatacacacttgtttctagcattgttttctgccggaaatgccatctgtcactcaaacccgaatagaaccaccctacctcaaagttctggctgacagcaggattacccttcggagccgcgagcgctggatggggactcagaatccgcagcacgttgacagcaggattacccttcggagccgtgcgcgctggatggggactcagaatccgcagcacgttgacagcaggattacccttcggagccgtgcgcgctggatggggactcagaatctgcagcatgttgacagcaggattacccttcggagccgcgagcgctggatggggactcagaatccgcagcatgttgacagcaggattacccttcggagccgtgcgcgctggatggggactcagaatccgcaccgtgtgtgtgaccactgcatggtggttttccgctgatcggtgtgaggagggcatgaagcatgtcacaaggcctattggacacatttgtgaccacacaggaccaacgcaggaagaggtcagcatttgctcttctaagcgtggaggatgacccttccacctgtgaccggtatcagcaaaaatggaacacagaatgcagccattcttccccaaacacctgtttacaggtatatcacagctcaggtgaccaatggttgaagtgaaataaacatctcaagaatggggaactcgtggtacctgaaaattcacagtggtcaatgcaagacaaaactcagtctaaattactaatgtacacataactgcaaaacatgaaaatgtataagaaattatgctttgaaagtagatataaaagaatcagttaacaaaacaaatctgacccaaaattccagattgtctcaataaaacccaaaaagtagctggaaataaaacacactgggtgcctcatactttatgagaagagggaattaagagacattttttcttctttgagacagggccttgctctgttacccaggctggaatgtagtggtgcggtctcagctcactgcaacctccacctccgaggctcaatcgatcctcccacctaggcttcccgagtagctgggactgcaggcgcatgccaccatgcccagctaatttatttttgtaatttctttttaagagagatgagatttcgccattttgcccaggttggtctcagactcctatactcaagcgatcctcccacctcggcctctcaaagtgctgggattacaggtgcctggccaagagatattttttgtattgtaatataagtaattagataagtatagctttgaatattcaaaagttatatatatatgcatacacatatccacctaagacaaccagcagaattaaaactaggaaaaacgttcgtcatcctgaaatacttgatctgctgatggctttttcttttattccctcttccctcttccctcccttgtgctctgtttataatttctccttgttgttgtccttttcctttcagtaggaattaagtttagaataactctttcctcattatttccttccctgacctctggaaaatgacacaaacaacatctgaaaagggagtcagtggatattaattcattcaaatcacatttactaagcatctcgtgtacagttctaagattgagctaaggaaacaaaagccaatgttcttgcagacgggaggccggtggcacagatccacagtgggctgtcttctctccttgtgagtgttcacgcctcgcctttgggcccttctgttctgggagggttctgctgacttccaccccacagggtgagtctccgctcacggcggatgttcagcgtgagggggcaaagcacaagcaagcgatccaagcccccaagagggtctgagccacaccagggcagctgggcagagctgtgggcagcctcttcctcctgcccctctccccacccaggcatccatctggtccaatcccttctgaagtgctaactcattcctaattgaggtgtgagctcaaagcgaagtgagaccccttccaggaggattcatgtatttgtgttttaaaagatgacactttaaggccccagtggtgtgtgtgtgtgtgtgtgtgtgtgtgcgtgcacctgcatgcatgctggtgagccagggagaaagcccccatcatccctgtgctccccagtggggtgtgtgtgtgtgcacctgcgtgcatgctggtgagccagggagaaagcccccgtcatccctgtgctcccctcaactccagtgggagtgcacagattcataaaattcatcctgcctggaaagtctgctgcctccccatgctgcaggtggccggctggctcccctgtacccagttggagggccccgccctcatcagaagatgcgctggaaatcacaccccaggaaagatagagcacctgcccctgtcctttcttccaaatcccccctggggcagcaaagctccccactcagcccaggagagcacagctttctccagagcctgagtgagtttcctcttcattccaagtgggtttttgagcaaccaggtcagtctgggaggcaggcaactgccagcacagtagaaaggaaaaacggcagtgagaaacagaattctgagggtgctgttttcttgacagatgatttaaacacctcggctagattatttcagaactagaggaaatgctttggcttccattaacccctggccggggactggctcctgtgaggcttctacacaattaccggtaaggagcatttgccagtcgcagagggaggtgttgcccaacgctggctcccgatgcctgtagggctgcgtgcccctggatcagggagaaccctgggacaggtcgccaagcttcatctctggcctcaccctgccttgtagcccagcctcggggtctgtgccccgtgggcaccccatggcctttgcatcatctctcacgtcacctgtgatgaggaaaggtccctacaagctgctgagaacaggggcccctgtcttccctctggtcctgcgcgccatcctctccctttgtccagatgctcttgtaagctcagcaaatgcatggaggctaatgacactttcatctgctgctcttaatgacttgtgttgtcaacatttgacagactcccctcactttcaactggcacgcggcatgaaatcctttggagccccagtactgaggctgctctgacaccggtttgagagagggcaggcctgttacaatggtgattggctgcgaagccgcctctgttcccagacggagtgggctgcatgcaggaaatgaataggggctggaggcggaaaattggacaggccaattagaccgagccaggtcttttcagacgagcgtcatgattttgattcaattcccaggacaacaaatgtgcctgtgtttaaacacagtctcagaaatatgttctcccaagccaaagtgaaaccctgtctgggctgaccccaatcggcagggctcgagggtggtgcagagcgggcggcctgcatctggggacactttttttgattacgtatttgattagtggctcatttccgacgggtcttgttccctgctggggaaagcctctagttctgaagtcccattgcttcctctgtcttccacagtcatcactgtctccctgaccacgtttagctctttggtttttccctgcattctgggagatcctacaggtctctccaaatcactgattcaagcttcttattttttgcctgattttagcgacctcctctcatcttttgggtgtatgcccgtgaaagctagcaaatctacaaaagtgtatttcatacagacatttcaaagaatcatattccagtaaatacctgtgagctcatcaagaaataaaatggtgctggatgtgagaagctcccgtaaacccaccctccctctcagaggtaaccaccatctggaattttgtattaagcaatctcttgcttttctagtttaaaaaaaccttgtatgtatgtatgcatttctaaataaatacagttgacccatgaaccacatgggctggaactgcacaggcccactcctagctggattttcctctccctccatcacccttgtgacaacgaaagcaacccctcctcttcctcctcctcatctccccgtcacccctgtgacaataaaaccaactccccttcctcctcagcctacccaacacgaagacgatgaggatgaagaccttcacgatgacccacttccccttcatgaagagtaaatatattctctcttcctcatgattttcttaataacattttcttttctctagcttattttattgtaagaatatagtatataatgcatataatatacaaaatatgtgttaactgaatgttttttattggtaagtcttccagtcaacagtagactattagttaagttttggagagttaatagttatattaagattttaagtatgtttttgggtttttttttttttttttttttttttgaggcaggatctcacgctgttgcccaggctgaagtactgtggcaccatctcggctcactgcagcctccgcctcccaggttcaagcaatcctccgacctcagcctcccaagtagctggggccactagacatgcccccactacaccaggctaatttttaaaaactttttgtagtgacaggtttcgccatgttacccagactggtctcaaactctggggctcaagcaatcctcccgcctcagcctcctgagtagctgggactataggttcatgctaccaggcctggatgattttttattttttatttattattatttttttgagacggagtctcgctccgtcacccaggctggagtgcagtgccgcgatctcggctcaccgcaagctctgcctcccgggttcacgccattctcctgcctcagcctcccgagtagctgggactacaggcgcccgccaccacgcctggctaattttttgtatttttagtagagacggggtttcaccgtgttagccaggatggtctcgatctcctgacctcataatccgcccgccttggcttcctaaagtgctgggatcacaggcgtgagccaccgtgcctggccgattttttattttttagagacgagggatcgccatgttgcccaggctggtcttgaacttctgtggcctcaagcagtcctcttgcctcagcctcccagagtgctgggtgtgagccaccgtgcctgacctacttattctttttcctgttcagcatctagtgtatgatacgatttgcttatttgtttatgtttcatcgtctgttccccaccctcagccctggcccccttgctggaacgcaagctccaggcaaagctatttcaccgttgctgttttccaagggcctcgaacagtgcccggcacatagcaaatcctcagtgaacattagaggaataagtgattcaagaatagagctgttagaaggtgttctggaggaagacgcatccggcttcatccctggcaccatcaattactacccaacgtctttgggcaagtgacctcttctctctaagcttcagtttctccacctgtcacagaggacaatgggctcccgtggggatgaagcgagatgatcatggcctggcccttagtgggcactcagctcacatctgctatgaacgatgggagtccttcggtgtgcctgtgtgtgaacgatgaactcacggactggagcactgtgctgaaagagtcagcagcctcttggatctctcagtgcctcagaggcaaacttctccagtgcacagacgtgggctcaggtagacgccccaggcaaggggcaggggaagatgggatggctcagtccatctgcaggggtgcagtgcaggagtccccatgaggcagactgccctgggggctggtgagcaccaggagccccctcctcctgccaccacccatgtgtgggaggccaggaggctgcactgatagcgggtctctctggcagagccacagaggcgtgggaggcgaccaacacactgaggaagtatgaccatccgggtcccccagggatgccgtgacagcagcccagagtgaggcaggcacagacggtggggtgctcaggcagccgcccgccccagcaccagccacccactcccgaatgcactcacagacctccagagggggccctctggcaaagctgtttgcagcaaaaatccaaactgcaagtaacagcagaaccaggagagaaacagcatggagaaacagatggcagcttgcggtgagcacaggccgcctgcccgggaagcaggtgccgcaaggatgctgggctggggctcggctagcacggccagttcccaccagcggctgggctggctgcggagtttgggagcccccgatgatcctgaccttccgtaggcctgtgaggcccagactgaggaagagtctcccagctggaagaccccagtgggctgctggtcacctccaggataagtgagttggagaggatttaaaaaccaaccctgccaggcatggcggctcatgcctgtaatcccagcacttagggcagcagaggcaggaggattggttgagctcaggagtttgaggccagccttggcaacatcgtgagatgccaactccacaaaagaaaaaaaaaaaaaatttctcccattctgtaggttgcctgttcactttgatcatagtttcctttgctgtgtggaagctctttagtttaattagatcccatttgtctattttggcttttgttgccattgcttttggtgttttagacatgaagtccttgcccatgcctatgtcctgaatggtaaagcctaggttttcttctagggtttttatggttttaggtctaacatttaagtctttaatccatcttgaattaatttttgtataaggtgtaaggaagggatccagtttcagctttccacgtatggctagccagttttcccagcaccatttattaaatagggaatcctttccccatttcttgtttttgtcaggtttgtcaaagatcagatggttgtagatgtgtggtattatttctgaggcctctgttgtgttccattggtctatatctctgttttggtaccagtaccatgctgttttggttactatagccttgtagtatagtctgaaatcaggtagcgtgatgcctccagctttgttcttttggcttagaattgacttggcaatgcgggctcttttttggttccatatgaactttaaagtagttttttccaattctgtgaagaaagtcattggtagcctgatggggatggcaatgaatctacaaattaccttgggcagtatggccattttcacaatattgattcttcctatccatgagcatggaatgttcttccatttgtttgtgccctctcttattttgttgagcagtggtttgtagttctccttgaagaggtccttcacatcctttgtaagttggattcctaggtattttattctctttgaagcaattgtgaatgggagttcactcatgatttggtactctgttattgatgtataggaatgcttgtgattattgcacattgattttgtaccctgagactttgctgaagttgcttatcagcttaaggagattttgggctgagacaacagggttttctagatatacaatcatgtcatctgcaaatagggacaatttgacttcctcttttcctaattgaataccctttatttctttctcctgcctgattgccctggccagagcttccaacagtatgttgaataggagtggcgagagagggcatccctgtcttgtgccagttttcaaagggaatgtttccagtatccagaatctacaaagaacttaaaacaaatttacaagaaaaaatcaaacaaccccatcaaaaagtgggcaaaggataagaacagacacttctcaaaagaagacatttatgcagccaaaaaacacatgaaaaaatgctcaccatcactggccatcagagaaatgcaagtcaaaaccacaatgagataccatctcacaccagttagaatggcgatgattaaaaagtcagaaaacaacaggtgctggagaggatgtggagaaataggaacaattttacactgttgggggaatgtaaactagttcaaccattgtggaggacagtgtggtgattcctcagggatctagaactagaaataccatttgacccagccatcccattactgggtatatacccaaaggactataaatcatgctgctataaagacacatgcacacgtatgtttattgcagcactattcacaatagcaaagacttggaaccaacccaaatgtccatcagtgatagactggattaagaaaatgtggcacatatacaccatggagtactatgcagccataaaaaaggatgagttcatgtcctttgtagggacatggatgaagctggaaaccatcattctcagcaaactatcgcaaggacagaaaaccaaacaccgcatgttctcactcataggtgggaattgaacaatgagaacacatggacacaggaaagggaacatcacactccagggactgttgtggggtggggggaggggggagggatagcattaggagatatacctaatgctaaaatgacgagttaatgggtgcagcacaccaacatggcacaggtatacagatgtaacgaacctgcacattgagcacatgtaccctagaacttaaagtattatttaagtcacacacacacacacacacacacacaccaaaaaaccatgtaagaccaaccctgtgaagccacttttctttttttagtcaatcaacaagcaggagagaggggccagaaggaagaaataaagacccagcctcagtgggccagtggcgacgtgagatcccagcaagggcgacatcagggagagaccccagcaagggctacgtcagggtgagaccccagcaagggctacgtcagggtgagaccccagcgagggcgacatcaggaagagaccccagcgagggcgacgtcagggagagaccccagcgagggcgacgtcagggagagaccccagcgagggtgacgtcagggagagaccccagcgagggtgacgtcagggagagaccccagcgagggtgatgtcagggtgagaccccagcgcgggtgacgtcagggagagaccccagcgagggtgacgtcagggtgagaccccagcgagggcgacgtcagggagagaccccagcgagggtgacgtcagggagagaccccagcgagggtgacgtcagggagagaccccagcgagggtgatgtcagggagagaccccagcgagggtgacgtcagggagagaccccagcgagggtgacgtcagggagagaccccagcgagggtgacgtcagggtgagaccccggcgagggcgacgtcaggaagagaccccagcgagggcgacgtcagggagagaccccagcgagggcgacgtcggggagagaccccagcgagggtgacgtcagggagagaccccagcgagggtgacgtcagggagagaccccagcgagggtgacgtcagggtgagaccccggcgagggcgacgtcaggaagagaccccagcgagggcgacgtcggggatatccaaagtgccccacagggaaaagattctgaagagatcggaacacgaaatttctttgcaaatttctctttcaatccacaaacttttcccgagcacctttatatacaacacactgcaggagacactgagtgctggctgtggcccgtggctgccgggttataatcaggatgtggcgggaaattgaggaggcaaagccaatgctgaacagagaagaacacgctaattgtcttaaccagctttcagctccttaaaaattggtcttcttcacccctttctaggccaccccccctcagataacatctgtgtcctccaagaagctttcttatggcccaggtacgtttgagacgctgcaggaatggtttgcagaatcctggggaatctagattccagtgaacttttctactgattacagcatcactttgagtgagtcattcttcgttttcgtttagtggatagggattcgaggctaaacagtaaatgaaatgaatttctggtttgcaacatcctgtgcttagaagccgccagggccgttcctcccagccccaactaacgcacccatgaaagcacgtggaaaaggcaccgcgaaaccccagcccggggcctctgacagctcagcaccaggctccacatcaggtgaggggatgaggcgggagacgggaggcgtgccatggaccacctgggcctcgcctgcccacctgggcctcgcctgcctggctggagtaggggcagcagctgaagccgcctgggcagccttcctggcacttcagggctgccagttcctggggccacaggggctgtcctccctccgccaaccctcctgtcatccctgggagatacagcttccagaatctagccagtccggcaatgtgagttgcattggggaaggagtatttcctgaagcaaggctgcatctgggagagcagggagagcaggaagagcggaggagacagcataagccaggggctgcggtccctcgtcctccctggttccgacgggccaggtcgcaggagagtcaaaggtgcctcctgcatggggcagggtcacaggcacaatcccagaccaagggaggggctatgaggagacgccttggagtcaatcctgggtctgcggggcttaggctgctgcagaagcggggaggggaaaacctccaaagtgtttagtgcaggtgaatgtggcatgctagggctcaggaacataattagacaattgtttggtgtctaggaaacataaagacgggccttactaataaaatagaaaaccaaaagaagaaaaggagcaaaataaaggaaataatggaggactgccgggaaaccagagtggagaacagaatcgaaacttacaccggaggggaaagagcagacgtggtcacggagaaaacagagtagctggaatgctgttctaggctcataggagcatgagctggtattaatacaggcactctggaaaatgatcaggaattacccaatagagttgaatgtggacacaccccataatccaagagaaaccctcaggcctaaaatctgcagaaactcttgtacatgaacatgtactccaggagacatgaatgtttacagcacaattattcataacagcaaaaaaaacaaaaaacaaaaaaaggagagtaaccaaaatgatcaccaatggtagaatggataaataggtacgtattttttacaatgggatatagaccacagtgatgggaatgaatacagctacacacatcaacatgggtgaatttcaagatcacaatgtcgaataaagaagaaatgcacagaaaaatacacacagatccaccttgtttatgtcacattcaaacacaagcagaactaagcatggggacgtctgcagtggggtaacgactccagtggtaattagtgggtacctcttttattatgattcttcaaactgcacacaagtgtttctgagtacagtttggaaccataagctcccaggctggagtacattggtgcaattacggttcaccgcagcctcgacctctggggcttaagcagtcctcccacctcagcctcctgatagctgaggctacaggcgtgtgccactatacctggctaatgtggggattttttgtagagagggtgtttcaccatgttgcccaggctggtctcaagctcctgggctcaagcaatctgcccaccttggcctcccaaagtgctgggattacaggtgtgagccaccatgcccaggcttattcccttttttgtttatttaaatcttgaacacacatcacagtttattaatccaccagcaagaaaaccaggcgagggactagagtgtgccagtccacagcgggaatggaatggaaagtccagagctgggaaatggagctctgagctaagcagccagtttacaaaggcaagcagctcattaggaggatgtcacggttctgtgtggtctcaagaacctcgtctccaggacagttggtacagaggaaatcggggacgagacagttgggagcaccaatcaggaatcaaacatttaaaataaccaatgagaagcaaatgataaggaaacatctgtggctgttaataggaatgacaaggttcaccgtgctaagaaatgactaaaatatagttcaaccgagttttaaaattcattcgtgagatctctcatttttagggatgaaaatggttcctggggttcttttccaaatttgcttgtacttttctcaaaggtctggtttgttcaacctggtttctattccttctcttagatcttttgttttattttagagacagggccttgctctaaagacctcagtgagcctttctcactaaggctggagtgcagtggcacgatctcagcccactgccacctccaccccccgggcagaagtgatcctcccgcctcaacctcccaggaagctgggactgcaggcgctcaccacgatgcccagctaatttttgtatttttttgcagagaaaaagtcttgccatatctcccaggctggtctcaaactcctaggctcaagcaatcctcctgcctcagcttcccaaaatgtcgggattacaggtgtgagccactgtacctggcctctcttatatcttttaattaattaatttttaaaaaacacattatcatctctttcaccatttcactattcgctctcattttctgggtaccaattctccaagctgttatattttccatttctccctcttttcttaatgtggctggtggacaacaggggtagaatccacagaattttgagtgggaaagatcaggattaattgcattatctgtaaagtggtcttttttgtataaaggcaaaaattctcagagagccaaggactcagaaaatgtatcatccatgcacccttatttttttaattacataaaattacagaccagctaattattagaaaaataaaataactcaagagtctacaagaaaataatcattgattttcctcctagaaatccattctaaggatagaatctaaaatgtagacagagagctatgcacacagtaataagagaaagaaatgaaaacaatttaaatgtcctcaattaggagaatatctatatgacagaatgtttacaaagagttcttgattacaccggaaaagacttaagatattcattttaaaacacaggttcaataatataaagaaaaaagacacagaaaaatggttggaatatactaaatattaacagtggttgtctctgattctggatttttggaaggtgtttatttatttatgcttgtctataattgtaaatgttcctcaatgatccatattaattttataatcagaaaagagtaaaatgtagagagtagatgttaaaaaatgaaaacttccaaaggtaacaacagataagaacttaaatatctgggcaatattaaataagaaaaataaaatactatgctactggctttgagatagtctacagtttatcctcagcacagcagacagagtaccctttaaaagagggggagatcggattctgtctccgctttactcaagaccctccaagggcgcctcattttactgaatataaaaccaaagtcttggccaggtgtagtggctcacgcctgtaatctcagcacgttgggagactggggcaggtggatttgcttgagctcaggagtttgagaccagcctgggcaacatggcaaaaccccgtctctacaaaaatgcaaaaaattagctgggcgtggtggtacagcctgtagtcccagctattcgggaggctgaggggggagggttgtttgagccctgaaggcagaggttgcagtgagctgagatcgtggcactgccctacagcctgggtgacacagtgagatcctgtctcaaaaaaacaaaacaaataaaaaaaaccccgaaaccctaagtccttacaaaggtctctaagcaccaacatggtctgacccactctatcgtaactctgatgatacagtttggctgtgtccccacccaaatctcatcttgaactgcagctcccataattcccaagtgttgtgggagggacccagtgggaggtaattgaatcatgggggcggttccctccatactgttctcgtgatagtgaatgagtctcacgagatctgatggttttataagaagaaactcctttcacttggtctcattctttctttgcctgccgccatgtaagacgtgcctttcgccttccgccgtgattgtgaggcctccccagccatgtggaaccgtgagtccatcaagcctcttccctttagtacccagtctcaggtatgtgtttattagcagcatgagaacagactaatacatctgacaacctctccccagccccaacttaactcaagtcacactggtctcctcgctgtgcctcagatctaccaagcacacacatctgcctcggggcctttgcacctgctgctttgcacccctacttggaatgctttccctccacatagccacagaagatgcttcagatctccattcaaaagtcattttgtcggtgggcccctctcttatccccatataaaccagcaactgccccagtgtccccagcaccccttctccctttgccctaaggacttgatcaccgtctgtgacactgcagaatttactgggtttgtggtctccctctcccattggaagagctattttgcctggcacataggaggtgctcaataaatgtgtcagctgcctacatgaataaacgcatttgactgcaggctcccaaagcagatgggctgaggctcacactgccgcctggtgaaagggcataacacaggcagcaacaccaccctgacagccccaggaacatctcaccagcactcaactcgctccagaaaaaatacttacaattacagccagagatgatggaagtgaagcacgaaaggaaaggaagataagaggccttgggcagaatgctccaagagttttcatcagaaaacccaagttcttccattaggatttggcttttgcggggagacataactccaaattttcatcacagactcagaaccagcttaaaatctgacattttaaacggcctttctagttagttatctcttcattatgattagacatttttctaagaagaaagggcattaggaaaccaattacgccagccttcccacaccccacaagcaggcagaaaaatccagcacatggttctggtacccacaggtacccaggctcatataccatgaacatgttcccagccccatccattcctgctaaccgtgcaccatatgcctggtgctgcagagagggaatatccttgatcttttagaggctaagttttatcagcctctaaaaattcaagggcaaagtaatagcgtaatgcacagcctcatattctctgccttaggaaagataagaaaattcatcctaagctatttcggacttttctgggcactggagccctctggagattaagacaggctggtggtagctcaagactgttacggagtgtgagggtgactcatgagggggatggggaaaccctcaactaaattattaaacttgctaaatttgtctttccttccattcactttcttttccttcaaagatccctcacttctgccctcccacagctcagctgtgaccatcttttcatcccacaaagtgtctccccacagacgatgttttaaggaatttcctcttccatggacatgtgcattgtcaaaggggtcccctgaagattagaaggacctcaggttcaaaggggagatttctggctgaagaggaagggaggcctctgatagttatggaatatctatgctggaggttttgcccacttcaacagtcttactgaattctcgcagcaactgtggagcagacattattaactccatctggggatgaggagtcagggacttccagcaagacagaatgctagcacacactgtgaggccctgcctgcagcttttcctgttccaaagacacggaagtgatagaggaaaatactttcacaacaacagcagcaaggaaatgtgcgcaaaaacaagatctatatctccatggatcataaattcaaagtatttgccattttgaggggtgaaggcacagccgcttgctgagctctgggctccgaagcagacagaggcagctgggagattggtcttccagggttcagggactaaaagtgacccttgggaggtgggggaccagagcagagtcactaaaatcaggctgttgaggggattttccacctgggaaaggaggctgaaaacagcagggacctgccccgggactataacatacataaggaaatgagctcagaggaaagcaagcccagcagcagcagggcctggccaagctgtcacggctgggatgagggtctgggaataatcccagtatcaccatggatgagcagctcgccacaaacccaggatgcctggctcagcactgggcaaccccagacccagcgggaggcagctgcaaaactattcagctagaagagccgggtgggaaacagagagaaacggactattatcacacaggatgagcgcacaaaccaaaattccaaaacttccaaggaaaactaaccctaagaaagacaacccacgaaaccaatggggaattgatctcaaggaaagacttagtgacttggaaggcagtactgaagaattcacccagaaaggaccacagaaagataaagaaataaacaagaaagagcagttgggagctgtgggggatggttgaggagctctgaaatgtatccagcgggatttccagagaggagagaaggaatggcagaggagcaatattcaaagacatcatggctgagaattttccagaattgaaggtgttttgtggatcctcggatgtgacaagcaagatttaaaaagtaataaatcctgatctggaagaccagctgcacgcctcctcgcccctcacattctgtcccagccctgcctccccagggcacttcccagaagctacctgccacgtcctgctgttttggctccaatccgacctggcacagggaggttctgactgtccctgcccatctgctactccccagagtccttgctgagcctcgacttccttccctcaaatggggttggaactagaaccatagaactgtagcagcagaaggggcgttgggtggcatcgtgacagcagacaacggctgagtttggtttccagctcccccactaactggctctgtgcttgcaggttatttaacctcttgtgtctttatttccccatcaggaaaaggggataagaatagcaccactggggttgtgcagggatgaaatgaattcatacatgcaaggaacttatggcagtgccaggcacacagtcagcgttcaccctgggtagctactactgttaccataataacagcccccacaaacaccacatgctctcacactcacagtgcgaggggcttcccaccgaaacctcggactctcccacgtgtagaacctgccacccctgcataggggaagtggccacaggctgtccctccgtgcttttctccgccgagtggtcagttcttccttgacttctggagaaacccctcccagtgactgtccacccatccccatctgagagcgtatccagcccgcccagccctccccaccgtcaccctgaccgtccacccatccccatctgagggcatatccagcccactcagccctccccaccgtcaccctggacgccctacctctctttgctcactgcagatcttacacagccacaggggccgcttctggccaggggaggcctcgatcccacatttggtgcagactttctacaagagagaggacatggggttgtaaagattgcagccgcttcctcctccgccgaggggctcagacaactgtaacgaagggacacttagcatcttccaaggagcgtctcttgcttcaggatagaaggaatcaatcaccccagaggcacagctcatctaaaaatccttagttggctttggacgtaatggatggccccatccacggaacccccaccccagagttaggttctgttggaaccacagcaaagcttgctgacattcacagctgcgtcacgtttgatagcaaagaactggaaacaacacagacgcccaatgccaggggagggtccaggcaaacacgacagcacgtgatctggccttcacacagccgacggcggtgctgcctggaaataatgcgattcaacaaagaaacatacgtttgcgtataacccgaaactggcctgcgtgtccgacaggtcagaagacacaatcgtgagaaatgctggtaacaacgtgacagttacgtaaactttgggcccacgttataggtgaggaacccggggcttggcagagtctgaggatatgctcaggttcacatggcagccacggattccggtcggactccagagacagtttatcatgttctctggacgcagaaataaccagaatctagaacctacagtctgctgatgtgctgggccatcgaagaccccacgcctgggagcttcatgagaactggaaaggggctttgctttaagcaaggttgattaagctcataacttataaatacaattactgttgcttaaaaacaagaatatgtcctgagaaaaggcacagtgaggtgattgcatcattgtgcaaacagcacatagagcacacttacgcaaaccaagatggtatagccggctgcacacccaggctagctgctgtattctgtggctgctaggccacaaacctgaacgacatgttactgtaccgaaggctgcaggcaactgtgacacagcggaaagtattcctgtatctaaatatatcatagaaatggtacagtaagaatgtggtattataatggtgtgggacatttgctggccgaaacgtcattatgtgatgcaggacagttcttacgttgcttcccctgaaggcacagcaacaaggccagaagaagcaagctgggaggcagaggtggatgtgttggggctgagaccggctccaggctaacccaggcagagtctgattcagcgatcgctggcgactcctcaggactgttgccccagctcatccatctttctgccacacggaagccacccggtccctgcgtgggtgggggctctctgcagccccccgccgagggaaggttgcatctgttgcttggccttttctgcaggctgccaactcagcaaggagcacgtctctccatggagagggaaaatgtcaccaacttggcttccacgtcgagcgtgtcgagcgtgtggaggtcactggcctgatcgggtggccgagctcagtgcccctggggtgggggagcaaactcacgggggacggaagctatgatacattcctgcgggggacggatttgctaccatccaatgctcaggtacgagaaatgtcaccttttatttatccaaagaaaatgcaatctgctccaagctcctgtccctctggattggcaggaaaatctgcccaagcctcagccacacttggggcccctttccagctctcatgaaggtcctaggcttggggtgtttgatggcccagatctgcagagggtcccctgagcgccgtccacactcctcactgctggccttcttgcttcccaagctctcatgaccccatgagagggagtgggagcatgtggtcatatctgtgccagtcctgggtttgggatcattgctaggctgggcttcagcccttccaaggaccagtagcctgtctccctggaaccctaggccaccatccctcacagagactggtgactctccccttccccaagagagcagcctctctccacctcttccacccttcgctcctaatgttcccacctctacaacagggtcccccatcagcctatgaggtgggctccagaaccacaacgtgggcctctcctctctgggtaaaggggagaggaagcactgatgctacttagctctgttttccttgcgaattcccaccatccctgtgtacactgtaacaggtggaaacaagtgtggccctcagagacgtgagctctcccttctgcactctacacacgcatcggttgagggcagctcaccttataaacatgcagagtgccctgccctgcataggctgctgaacgaggcgatgctgcgggaacaggagggaatcaaacacccacagcgcagttagtgagcagttatcggaccgggccagagtatgaaggaggcaggtgttatgatccccactatatagatgaaggaacaaaggctcagagatgactcgggctgcccgaggtcacacagctcgttcacggtaaagcagaatttttgttcagacctcaggagggtcggtcacaccctcccctgccctggtgccaggctggtgcgcacggctctctagagagctgcttctgctcaggcgggtccctggggacgtggctgatggctctcaaaacaatgggcagagaaggtgccaggggccgaccctgggacaaagctttgctggggtcgtgagtgtggcctgatgctgactctaggagcaacggcccaggctggacagtctggccctgccctccatgctctcccagtggggaggggagaggtttccagctgtcagcaggaggcccggcagcctctccattgcaccccacaggtgccctcgcagcctggcctctcccccgggggccgccttcccctatgcacacagccaagggggagaggacagcctctgccccatcgtagtcagcttaggctgctgtaacaaaaataccatagactgagtggctgaaacaacagaagcatgtttatcacagctgcagaggcctgacggccccggtcggggtgcccacacggtcaggttctggggagggctcttcctggcgtacagacggcagcttcttgctgtaccctcccacagtagagtgaggtctggcctcctcctctgataaggacgccaatcccatccccagggtcccaccctcaggacctcatctgatccctcccaaagcccccatctccaaatatcacatctgcgtgacggcttcaacgtaggtattttggggtgatataaacattcagtccacagcagcgcccgaccaggactgggatcctctctctgcttttgtactcgggagccctagaaatgggagcatcgtcgtgtctctcagccctggagtcgtctagagccctcggtccccctgagcctgcacctcacgccatcctgcgctatcaccagatcctgttcctgagacgtgactctcggctccttcagaggccgcacggcacggcgcacaggtttggggatggcagacctgggtgggctcccgggcaagtcacccaaagcctctctaaacctcagacgttctcagctgtaaagtgggataatacttacacccttgggttgttttgaggatcaactgagacacaggaaaagcaaccagcacgtaatagcgactcgataaatgccagctgcggttagtgcagcccctcgtaccgtgttctgcagcccggcgtggttttcctctagtcccacacgatctaatacggtagccaccagctgcaggtggctatttaagtgcaaactgattgtgatggaataaaatgaaaaacagctctgaggtcacactgaccccatttcaggtactccgtggcctcacgtggccggtggctaccgcaagggacagcagagaaatacattttcatcctcaccgtgaggttctgcaggacggcgctcggccagaggaccctgccctcagtctccccactcaacctgccaacagcctgctcccctgctcccctacagcttccaatcaacccgactgatgcactcatgtgcctgcccctcagcgcggctctatctccacccccatcccgtctagcgctcacctcccctgcgattcactaatccacgttaccatcacccgctgagcacccgtgaggggcacaggcctggcgtgacaggacacggatgaacagggtggggcccaggccccactgtgcaccccgggatgccctcaacacttgctccgatgtccccccgccactgctgggggggtgctcggctgccctgtgggggggtttgagggacaaatgtgcacgtgtctcactgatgaaacagtgccgtgggggcagggagagaagccaggagagtgtccacggaactgagtcctgtcctctactcacagaccacgaggacgcggagccaacggatctggggacaggagcagcgtggaccagtcgccctccagaggttgggtgaagggctgtccctgctgggcccacgaacctctgccttccccttagggtctggtgcttcctgctccccagatcgcgcctcgggcagcctgttttcccgctaccaaccaacgctggcggcacctggggtcagttctccacctcagccatccccctgctgcttcagtgtctctggctggcagggggcagggggcgttcctaagaggcgagggctacggaaagacgacacgctcccactcaaataacacataattgctgctttcgtaaatctcagatcaataaggcagtcatgggcctcttccaatgggctcggtctttgttcccaggttccaataaagaaaacgaaacaggtggtatttttgaaaacccatgcgacagcgagcaagccagcctctacatcaccttggtgcaaacacagcccttcacgatctgtgtctaggacagtcccggggcccaggggtggccactcacttccctgcctgagatgggcttcctcggagtggatttgcccagggcaagcgagtcctggcttcccgggcttggctgcctcatgcaccctgcagcctggaactgcgtccgggtgttaaacgatgaagcttctgggcctaacccagggcagaagccacacaactccaggctttcagacctcgcaccctctctctccaccgtcagacctcgcaccctctctctccaccgtcagacctcgcaccctctctccaccgtcagacctcacaccctctctccaccgtcagacctcacaccctctctccaccgtcagacctcactccctctctctccaccgtcagacctcactccctctctccaccgtcagacctcgcaccctctctccaccgtcagacctcacaccctctctccaccgtcagacctcacaccctctctccaccgtcagacctcgcaccctctctctccaccgtcagacctcgcaccctctctctccaccgtcagacctcgcaccctctctctccaccgacagacctcgcaccctctctctccaccgtcagacctcacaccctctctccaccgtcagacctcacaccctctctccaccgtcagacctcacaccctctctccaccgtcagacctcactccctctctctccaccgtcagacctcactccctctctccaccgtcagacctcgcaccctctctccaccgtcagacctcacaccctctctccaccgtcagacctcacaccctctctccaccgtcagacctcactccctctctctccaccgtcagacctcactccctctctccaccgtcagacctcgcaccctctctccaccgtcagacctcgcaccctctctccaccgtcagacctcacaccctctctccaccgtcagacctcacaccctctctccaccgtcagacctcgcaccctctctctccaccgtcagagctcgcaccctctctctccaccgtcagacctcgcaccctctctctccaccgacagacctcgcaccctctctctccaccgacagacctcgcactctctctccaccgacagacctcgcacgctctctctccaccgtcagacctcacactctctctccaccgtcagacctcactccctctctccaccgacagacctcacactctctctccaccgacagagctcacactctctctccaccgtcagacctcactctctctctccaccgtcagacctcccaccctctctccaccgtcagacctcgcaccctctctctccaccgtcagacctcacaccctctctccaccgtcagacctcactccctctctccaccgtcagacctcactccgtctctccaccgtcagacctcgcaccctctctctccaccgtcagacctcacaccctctctccaccgtcagacctcactccctctctccaccgtcagacctcactccctctctccaccgtcagacctcgcaccctctctccaccgtcagacctcgcaccctctctctccaccgtcaggcctcacaccctctctccaccgtcagacctcacaccctctctccaccgtcagacctcacaccctctctccaccgtcagacctcactccctctctctccaccgtcagacctcactccctctctccaccgtcagacctcgcaccctctctccaccgtcagacctcacaccctctctccaccgtcagacctcgcaccctctctctccaccgtcagacctcgcaccctctctccaccgtcagacctcacaccctctctccaccgtcagacctcgcaccctctctctccaccgtcagacctcgcaccctctctctccaccgtcagacctcgcaccctctctctccaccgtcagacctcacaccctctctccaccgtcagacctcgcaccctctctctccaccgtcagacctcgcaccctctctctccaccgtcagacctcgcaccctctctctccaccgtcagacctcgcaccctctctctccaccgtcagacctcgcaccctctctctccaccgtcagacctcgcaccctctctccaccgtcagacctcgcaccctctctccaccgtcagacctcgcaccctctctccaccgtcagacctcgcaccctctctccaccgtcagacctcgcaccctctctctccaccgtcagacctcactccctctctctccaccgtcagacctcactccctctctcccggccgtcagacctcgcaccctctctccccactcctgtctcagtccctccatgtgcttcttttgcaaagaaatgtatattctctctacccccaagaacacaggggagggggttccccagggacctgcccacgggacacaggctttggggcaggagagagcagggtgtgccgtttagaggtgaacttggactcggtactcgccttctgagcctcacttcctcatctgtaagttggtggtaacaggcccccccacaccccaggttgcagatgaggggatcaagggagacggtcatgaaagtgctcagcaccataaaaggttaggtaggcggcaacctcagacctttatagccatgcctgtctcagtgaaggcagccagcatccatcagtcacacaagccacaacccagcactcatcctgggcccccatcgtccctccttcctgcccagataatccatctccaagaactcaaatctctctccaacctctcaattccccttcagccccgtccctgatctctgctgccaccgcccacgcccacaccaaggccgcccagcagatctctctaccccaccgcgctgtcctccagctggttcccgacatggcagccaggccgattttctcaagaggcaaatctaatcatgtcacctctcccatccctcccaacttaaaagccatcagaggcttcccgctgctctggggtgaccaccgcctcacttcatacggcattcgggccggccctgcctcctgctctacttcctcagccccgaccctctgagctccagccgtgtgggccgtttgtcagcccctggtccttctgccacaggacctttgcacgtgttgccccctctgtgtggccacgctgtctcttcattaacctacacacccctcggacctcagcaaaagcaccacatcttcaaggaagacttccgcaacactccttccacaatgagagcctccagaatgggctcctgcctcttctccgctgtcaaggttgtgattttaccctccgctgtgtggctgcagggctcctgtgacttcccctgctgggccgtcatcttcccaagggcagaggccacgtctatttctgttcaccctcctgctccctgtgcccggcacagtgactatttgcagaagaacggattgaacaaatggaagctacttaagatattacagttgaaaaagcaagacaggctccctcccggaacatgccgacctgccgggaagacaagctgcacggaggcgtgaaggcactcgctcagcgacacgaggcagggtccaatcacgtccacattgagtgatgctgaccagcaggattgtgggaggccaaaccagggagagccacacagcgggcaagtgtccgaggaggtggggtggtggccaggtgggcctcagtctcagggtatggagcataaacccaggctggcccggccacaggggaaatgactccgggaatccttcactgagggtgggaagcggggatgtttaccagaccattcccatgacggctcctgcctgcctcccccggggtgcgtgccgcggccgcctatgtgtgcagacccgtcccaaggcctgatcaggcaccttcctcaatgtccttcttatccagggccacttcagtgacatttctgcttcctgcgactccccgtcccaccccttctccttcccagatggcacccaagagtcacaatgcgacagaaggttctgctgggccactccaaagttcaggtacttcatgcccaggctggcctttgagtcctcaccgatccatttcatgatgaggaattccaccacgctcccgcagatcagaagacgggaaggggcttagtgccaatgtagggggagggaaggaaactgctctgaaagcagacgccgccatctcacagcacccgcggtctggagtcagtcactggcagcctcacactcctggacgggccgggacagcttcacagcgtcaccatccatggcacagagagggctgttcatgagcctcactcgaccgaaaagggtgaaactgcgctcaaacgtcctgtacaaggaggcctggaccatccatggcacagagagggctgttcatgagcctcactcgaccgaaacgggtgaaactgccctcaaacgttgcgtacaaggaggcctggaaaacgtacgctgtgctgtggagatgaacactgaagatggctggtttaaacgtgtggagcttcaattcacaaacatgttttctatactgtagggaaggcattattctaagaatgccgaaaacaaacaagacacggccctttgtcctcaaagagtgtcccattgaacggagtagtttatccattagcaaaactcagggccaggtgcggtggatcctgcctgcaatcccagtgctttgggaggccgaggtggggggatttcttgaggccagaagttcaagaccagcctgggcaacacaatgagactcccccaccccccatctcattttaaaaaataataaaataaaatagcaatcttttatctggaaaattactttcctgagagttccagtgagttgaaatcggcaggtgagctggtttctcattgggaaccgcgctgcagacggtgcttacagaggggtcatccccctgccccgataaaataggataagaaatagctacgtctgaatggcctcggtgcatgcacaaagcagcataatgagagcctccacgtgtgtgtttcatgccacacaatgtgctcctgatgccagaaaccaaatcttcaaaagggaaaatcttactaggtttaggggagagctttgcagcaacaaagacgatgatgatgtaaatagaaaagtgacgaaatgacaacgaagctgtgtggggcaatattcaccataagctgttaagttaaaaaaagcacgttggaaacagtctgcatagcagggcgctccaccacgtaaatatgtagatgtgcctacatctatggaggagtctatatatacacagaggacaatctagaaagatatcagcccaaatggaaatcaaactgtgcaaagtcaaaatctattttaaatggataagcagaattcctatttaaaggaagcttatgctaaatgctttggaaagtcacttgccccaacttcattttttgaccaggtctggatttttgcaggtcaggatggattaaagcagctgaaagtgtccacgcagacaggcaggagacagccacagtggctgactgtggctcaattgtaatcaggcctgtgcacccccacagcgggtcccagatggtgtccccgggtcaccggcccctccgatcataagctcagccctgctcagcccctgaagtgccatccgccaggcttggagaagcatcacctgccccagtgggccagcagcggaaaggctggatacagctctgttgctatagacgctgtctggaacccaggccctgctgccaaatgactttaaacgtatagacagttcagatattgatgtatataattacaaatatttatatactttctcgggtacttatgcttacactaggcaccaagctagctgttttatgcagaatctcatttaattttcaaaacagccctatggggtgggtatgactgttcctgttttacacaagggatctgagacttgaggttaagcagctcgacgtggggacctgggatgcgaaccctgttcagtctgagcctcggtcccgggctcctgctgccccagccgggcctggctgcctggctagcacactcttgcaggccctcatcctcccgcctggacccaacttcaccctccccaccccgaggtaaggcaaggctggatccctgggccctctcctcttccagaacgacagatgaggtcaagcttcaagtgggaggggcacagccaggcccctcttcccattcgttaggacacagcccgggggccagcagcgctgggagcacgccgagccctggaccttaccccgactacccacaaataccaagtcacagaaggccccaaggaggcacagccttaatgccagccacctgctgccgggtctgagacagaagccagaggcaagtggagaaacatttcaggaggaaggcaagtctccctggacttcccaccccacgtcctccatcctggctgctggcggctcccaggggaaccagccactcagggccgagccgcctctctttaccaaggcttccggcaggcccttcccctccatcggaagagcctctgacatggcctggggaccacctgcgagcctcaggcctgtgccagcccccagccacctctcccagttgaaagcaagcaccatcatttcctgtggctttcaagctcggcttccaaaacaccaaacacctcctccctccgcctgccactcatgcagttaccactgcgtcccgagtggagaggagggttaaaaaaggcaacagcatcagctgttgactattaacattcacagagcacataataagaaatcatgacttggacggggcttcggatcatttctgcactcgtgcctctgcgagtgtcagtctcagggaaatcggggtattcagacgagatgaagccgccaggatggctgggggccggggctccgggggtggggcagcggggtccaggggcctcagttaaccccttcccggtcctggttaacctctgcatcccctcagtcccagagaggtttctgcatcttttccggcaggacacgggaaacaggaggtttgagccatcgagaactgggctgagggccgtgcagcaccggtgatgggagcacggtgcactcaacaggagcttcggccaaggggtggatgggatggctaaatcagaaggtgggaggagggtttttaaaaaccagcaaatctggtcgggcgcggtggctcacgcctgtaatcccagcaatttgggaggctgaggtgggcggatcgcctgaggtcaggagttcaacaccaacctggccaacaaggcgaaaccccgtctctactaaaaatacaaaaattagccgggcgcggtggtactcacccggaatcccagctacttggtggctgaggtaggagaactgcttgaaaccagaagtcggaagttgcagtgagctgagattgcaccactgcattacagcctgggtgacagagcaagactcggtctcaaaaaaataaaataaaaataaaacccagcaaatctaataatgttcaatcaaaggggaaagcacaggacgtggggcttggtctccaggggttcctgagttcattcagcatctgtggaggacacagtggtgccaggtacgagcccagtgtgaggtgtgaggtgtgaggagtgctgatgggatgaagagacgtacaaacgccagcatgggatggaccacttgagcccaggtgatcaagaccagcctgggcaacatagcaagaccccgtctctacaaaaaaaaaaatacaaaaattagccgagcatgctggtgcacacctgcagtcacagctacttggaagaatcgtttgagctcagaaggtcgaggctgcagtgagttgtgattgcaccacagcactgcagcctgggtgacagagtgagacccagactcgaattttaaaaaggccaacctgagtggacacagcattaagtctgaccaggactgaagaacacctgtgcagaaatggacggcagagggaatgcacatcagtgtgggagggacagaggagctgcagaaatggatggacagagggaatgcacatcagtgtgggagggacacagatgctgcagaaatggacagcagagggaatgcacacagtgtgggagggacagagatgctgcagaaatggacgggcagagggaatgcacatcagtgtgggaaggacagaagagctgcagaaatggacgggcagagggaatgcacatcagtgtgggagggacagagggaatgcacatcagtgtgggagggacagaggagctgcagaaatggatggacagagggaatgcacatcagtgtgggagggacagagatgctgcagaaatggacagcagagggaatgcacatcagtgtgggagggacagagatgctgcagaaatggatggacagagggaatgcacatcagtgtgggagggacacagatgctgtagaaatggaaagcagagggaatgcacatcagtgtgggagggacagagatgctgcagaaatggacgggcagagggaatgcacatcagtgtgggaaggacagaggagctgcagaaatggacgggcagagggaatgcacatcagtgtgggagggacagagggaatgcacatcagtgtgggagggacagaggagctgcagaaatggatggacagagggaatgcacatcagtgtgggagggacacagatgctgcagaaatggacagcagagggaatgcacatcagtgtgggagggacagagatgctgcagaaatggacgggcagagggaatgcacatcagtgtgggagggacagaggagctgcagaaatggacgggcagagggaatgcacatcagtgtgggagggacagaggagctgcagaaatggatggacagagggaatgcacatcagtgtgggagggacagaggagctgcagaaatggatggacagagggaatgcacatcagtgtgggagggacacagatgctgcagaaatggaaagcagagggaatgcacatcagtgtgggagggacagaggagctgcagaaatggatgggcagagggaatgcacatcagtgtgggagggacagaggagctgcagaaatggacagcagagggaatgcacatcagtgtgggagggacacagatgctgcagaaatggatggacagagggaatgcacatcagtgtgggagggacacagatgctgcagaaatggaaagcagagggaatgcacatcagtgtgggagggacagaggagctgcagaaatggacgggcagagggaatgcacatcagtgtgggagggacagaggagctgcagaaatggacagcagagggaatgcacatcagtgtgggagggacagagatgctgcagaaatggatggacagagggaatgcacatcagtgtgggagggacacagatgctgcagaaatggaaagcagagggaatgcacatcagtgtgggagggacagaggagctgcagaaatggacgggcagagggaatgcacttcagtgtgggagggacagaggagctgcagaaatggacgggcagagggaatacacatcagtgtgggagggacagaggagctgcagaaatggatggacagagggaatgcacatcagtgtgggagggacagaggagctgcagacatgaacgggcagagggaatgcacatcggtgtgggagggacagaggagctgcagaaatggatggacagagggaatgcacatcagtgtgggagggacagaggagctgcagaaatggatggacagagggaatgcacatcagtgtgggagggacagaggagctgcagaaatggatggacagagggaatgcacatcagtgtgggagggacagaggagctgcagaaatggatggacagagggaatgcacatcagtgtgggagggacagaggagctgcagacatgaacgggcagagggaatgcacatcggtgtgggagggacagaggaactgtcctcacggggctggaggacacagccaggagcagctcctggaccagctccaccttggtaatgagattcaggatgtcaagcccagaggccaggcgagtccctcacgagctcgtttccgccgatggctcgccatggccaccaccggttgcaccttcacctctgaggggctgtgggggcagtcagaacccgcagggcccaaagacgggctgttcaacgtcacgcccgcttttttcaaacacacaatattgttttgaaacttcaagtcacatatgaaaaaaagggtgtggaagggttctacgtgtatcaaaagggagcctgggttttgaaacgtggatcaatgctgctctaacgtcctgccggagaaggaaaaggaacccaccagctccgctcaggaggcctcttgggggtctccagaatcatccccttcaagcatccaaggggacaaggctgggtctcgtggggcattgtgtgaggacaaaccgtaacaccgattttccccagggggtgagtgaggactggaaatcaacatgcatccatagccacccctctgcggagagttccatcaggagctctggaacacaaccctctccaagccaacatgatgaagactccacaaaaacccaagacgtcggggcttggggcgattccagatatagctgaacacgtggaggttcttgaggggaggccccagaggggatccaacagcccctcgcctatccccacatgccccacccagggcacctctcccatctggcggctgccttgttcatctgtgcactttgtaatatccttcgtcataaaccagtcaacataagcaaagtgtttctctgcgagttctgtgagccactctagcaaattatcgaacccaaagtatgggttgtgggaaccccgattcacagccagctgctcagaagttccagaggtctggacgtgtgactggcatctgaggcgggggacagtcctgggaccgagccctcgtcctgtgggatctgatgctacctccgggtagacagcgtctgaactgagcacagcccactggagaatgtgctgcggatcgggcgtgggtgggagaaatccacacacatcttggtgaccagaggtcccaggagtgtgctgtgttgagtaactgtaagagaataggaaaaaccactttgcttggtgttttcctctattttcagagcctgatgcccaagacactgaagtcctgtgcttccggaaggcttaaaacctcccaggagggtgaggcagcagcctcggtcctctctccaccatccccttccctagaatctggtgaagagcaaggttggtcacaggtcagggctgatgttgccaagggcattccgcaaacacttgtaagtccccgttactcccgggccctggactagccagcggacagggaggcttcacgagctgatggggagagaggcaagaaaatgacacacggacgaacatgcaaacttccctccctggcccccacctctctctagtcctgtccccaccggccttgccaagcccaccacgccagccccacactttgctgtcctctcccaaccctctagccacctctctgcctccgtgccctgtggctcacacctggcaaacttctacacatccttcaggaaccctgacatttcctcctccatgacccagtgccagggtccaccagaaactgagtcagcacagaccacccagccaaagtcaggagaccgtccacgtcctccagctctgcccccaccagctcagtgtggggtgctggggcccctcagtagccctcccccgaccccaatctcaggggtagagcaccggcctctctgatgttccaggattatcataactcttaaaaggtcagtccgtaaaaataccctctcccttccctgtgttcgttcccatgcctgggatacagtcaacagtctccaagccaggctgggcacggtggctcacccctgtaatcctggcattttgggaggctgaagtgggcagatcacttgaggtcaggagtttgagaccagcctggtcaatacagcgaaaccccatctctactaaaaatacaaaaaaaaaaaaattagccaggcatggaggcacactcctgtagccctagctactcgggaggctgaggcaggagaatcacttgaacccgggaggcggaggttgcagtgagccgagatcaggccactgcgctccagcctgggtgacaaagggagatgttatctcaaaaaaaaaaaaaaactcccagccagcaaatacatgttattggaacttatcttttatctgaaaaatacagcagactagacaaacattgtaggatttcttaatattctaacagcaacagcacactagcgatcccttagggaccctggttatgcacagaacggagctccaaggagggggacggcaggtcggggccgggggagccaggcctggccctgggccttagaaatcccagctggggatttcactcacgctgctcaagtcagcaggctgcagccggggaatgaactgagggcctcggataccacgtgggggtgttttcgactttatgctgctggcagtagggagccactgaaggcttcggggggagggagggggacagtgacctaatcggagctgcacttgaacaagcagaggagtagaggatgcactggaaagcgaatgagactcgtccacagtctggaacccagtgggggccctgcaatggcccagcagcccctcccctgggttggcaacccaggtactcaggcctcactccctgcagggcccgaatgccgctgctgtctgagcctgtatgtggttcctgggcagaagggtctcacccttctctgcctcagtttatccatctgtaacctggggcagacccctccctccctccctcccacggaaggcaggacaaaggtaagaggagagtctggaaggagagggctaaaggggcctctggtgagggcctgattctcagtgttgaggcccaggctaaaaggaccctgggggaaatgaacccgctccctcttttccactcagcttccccatcagcagaagagctgccccccgtgtcctcccacagggaacaagacgggccaagtccatccccagttaaggtccgtgaacagcaaacagctgcagggaaatgtcccagcgggaagcacaggggcgactggaggccggtgaagaatcgcaggcctcccgaagtgtgccagcttgcagggcacggccgacgaggtgtgcggcacggggccgcgccggactgcaaatgtcattatctgttatttaccacaacagaggacgagaggctgcacaaaattaccgcgcttggcaacggccgctgagtggatttgccaacgatgcttcttcctgctgccagaggctacactgaccagacccagggaagacggccactgagcctagggggcaggtgtcccgggggagaaggagtccctgcaggacagccctgaccagtgtcccaggtaccccagcctaggcccgcagaatctctcacccgctctagcaggggctggcccagcctaggcctgcagaatctcccacccactctagaaggggctggcccagcctaggcctgcagaatctctcacccactctagcaggggctggcccagcctaggcccgcagaatctctcacccgctctagcaggggctggcccagcctaggcctgcagaatctctcacccactctagaaggggctggcccagcctaggcctgcagaatctctcacccactctagaaggggctggcccagcctaggcctgcagaatctcttacccgctctagcaggggctggcccagcctagacctgcagaatctctcacccggtctagcaggggctggcccataggcctgcagaatctctcacccgctctagcaggggctggcccagcctagacctgcagaatctctcacccactctagaaggggctggcccagcctagacctgcagaatctctcacccactctagaaggggctggcccagcctaggcctgcagaatctcttacccgctctagcaggggctggcccagcctagacctgcagaatctctcacccggtctagcaggggctggcccataggcctgcagaatctctcacccgctctagcaggggctggcccagcctagacctgcagaatctctcacccactctagaaggggctggcccagcctagacctgcagaatctctcacccgctctagcaggggctggcccagcctagacctgcagaatctctcacccactctagcaggggctggcccataggcctgcagaatctctcacccgctctagcaggggctggcccagcctaggcccgcagaatctcttacccgctctagcaggggctggcccagcctaggcctgcagaatctctcacccgctctagcaggggctggcccagcctagacctgcagaagctctcacccactctagcaggggctgccacagcctaggcctgcagaatctctcacccactctagcaggggctggcctcacagtgaggctgggccgtgactcctccacgtatccaactattgtctagccaatgcaaaggtgggacagaccagggcaaggcctcaggcccactctgtaggggcgctgcctcaggggggcccagggctgggtgctacctctcactctggatgctccgccataggggctgcaatcccttccccagcatcgtgggcacgtagccgtcggccacctcatttcatcggccaccttattcgaaagtgggacgagacatcaccttcctttggggtctcctgctcatctttagatctctttacatcttaaaaggtacataggcaaagttctctgggcttttttttcttgagacagggtctcacgctgtcacctaggctagagtgcagtggcgggagcacggctcactgtagctttaacctcccaggcttaagcaatcctcccacctcagcctccccagtagttgagattatgggtgcgcaccaccgtgcctggctaatttttgtatttttttgtagagagggggttttgccttgttgcccgggctggtctcaaactcctgggctcaagggatcctcctgccttggcctcccaagtagctgggactgcaggggcacaaccaggcccacctaatttttttcattttttattaaaacagggtctcgctttattgcctgggctggtctcaaactcctggcttccagtgatcctcctacctcggcctcccaaagtcctggaattacaggtgtgacccaccgcgcccggcctgtaggcaaagtcctgagccgagctgtgaccacgcctggcctgtaggcaaagttctgacccgagccgtaggagtcattgcaaggcactggctgtgtcatcgagagggagtcatccctctgagcgtcagtgtctccatctggaaaacgagtatgaacactgccttgccttttgcctgcccatctcctgggggccatgagggacacatgacatcatggaaatgtcaggcacagcggctctcagaagcacccccaccctgacttcctcccgctcagagggcacagactcactacggcctgagccaaagcgaactgggcggcaaacctgccacagctttaaaataaccacaatcgagctgtgtcccagaggcacagaggcgagagcttcggctcccagcccagctgctgccactgcggcatctgcggactgcgaggctgcaaggcctggactgagcccgagctgcctgggaggaaaccgcaggcaggcccgagagagtctctcgtccagcctttgcctgtcactggaaggccagagagggaaacagattttcatctgaggtcacgcaggaggttctgagcacagctgtctcccgactctcgcaggtgtagcaggccaggcaggtccacggagtcaccccgccccacccactacgtccgtccttcgatttacacaaggtccaaggagccgttgcagggaatgaacttgagccacgccttcagctggatttcagacgtgggcaggtgtgtctgtgtgcggtgcggggaggagagaggaagccatcggagccacactgcagagagggccgtgtccccaggagagattcggaccccaggacgaggctaagctcaacgggaaacaggatgggaggcgcccgccgtcgagggagggtggatccaggcccggccctcccggctgccacccacactcaccccaggcctgcccagcaggtgtgtgagccgcctggaaaaggggagctacagggaagggtgaaaaagccccgaatacaacacagctcctaaaactggaattcgatttacatgtatagtcatgggacgatgtttttgatatcttattaagtggaaaaagaagatgaaaaaaggagtgtacataggcatccaccctgcgaacatttgtgtgagtgcgaagagacagagaaggtgggagaaggacaaacacccagaccccgaaggtcaggggcgggagcttcgcatttcacacacacctctggtgtttgacttattttttagggttggaatatccttgatatgtcatgtctatgaggcatccaagtcagacaataaacttggcagttctctataaggttcgaggtggagataaagtctgaggtttacaaagttaagaactaacaacgtaactgtatcgttaaggttggcggctcatgcctgcatcccagcagtttcagaggctgagcaggaggatcgcctgaggagtctgaggcagcctgggcaacataacaaggcccagtctccacaaaaaatgagaaattagccaggagtggtggcgcacacctgtagtcccagctgcccgggaggctgaggtgggaggatcactggagcccagaggggtgaggctgccgtgagctaagatcacaccgctgcactccagccggggcagcacagcgagaccctgtctcaaaaaaacaatcacgaaaaaaaaaaagatttaacaactttgcaatgaattagatcacccagcagttataagaaagaggttggggggcagggaggaaggctgtactgaggttttaataattattgagcagtgaccgtgtttcaggaaagagatggggagggagggaggctgtactgaggttttaataattattgagcagtgaccgtgtttcaggaaagagatggggagggagggaggctgtactgaggttttaataattattgagcagtgaccgtgtctcaggaaagagatggggagggagggaggctgtactgaggttttaataattattgagcagtgaccgtgtctcaggaaagaggtggggagggagggaggctgtactgaggttttaataattattgagcagtgaccgtgtctcaggaaagagatggggagggagggaggctgtactgaggttttaataattattgagcagtgaccgtgtctcaggaaagagatggggagggagggaggctgtactgaggttttaataattattgagcagtgaccgtgtctcaggaaagagatggggagggagggaggctgtactgaggttttaataattattgagcagtgaccgtgtctcaggaaagagatggggagggagggaggctgtactgaggttttaataattattgagcagtgaccgtgtttcaggaaagagatggggagggagggaggctgtactgaggttttaataattattgagcagtgaccgtgtctcaggaaagagtggggcagggagggaggctgtactgaggttttaataattattgagcagtgaccgtgtctcaggcaccgttttaagagtttatcacatactttcctcattgcaatccttgcaaccgcccccgagataggtattattattcccgacttccaggtgagagacctgaagcagacagaggtgagggaatgagcccaggccgggaggacgcagggaggcagaatccagcgttctaaacctctgcacagtcctgtaagttactttttaaaattccgtcgagaggaaactagtaagaccaagagaagctaactcattaaagtctgtaatctgctgaggctcaaacaactgaggcactgaggctggtaccccaggccacccccaccaacaacataaccagaggggaaggaagtcaggccccttctcactctgagcagctggtgcctgggattttaggctgtcacgacgattccacccggccagggcaggcccgaaccagccggaggccacaggagaaccaatgagcctggctggactcctgcaaaccttgagggacgccgagattcacattcactgaattttcatgccacgtgacactcttcttcttttgttccctcccgccctgccccacggagccatttacaaacataaaaccatttttaaaccatttttaaatgatttaaaacctgtttctgtaccaagtggtacagaaataggggccagcccccggtccagcgccacgagctcctagggccagagtgcaagagaggcacagggcgagagggggacagggcgagagggggacagggcgagagggggacagggcgggagggggacagggcgagaggggacagggcgagagggggacagggcgggagggggacagggcgagagggggacagggcgagagggggacagggcgggagggggacagggcgggagggggacagggcgagaggggacagggcgagagggggacagggtcatcagggtgcttagggtgggctccggggcgtctgcaccaccaggcgcacagcccaggaggtggcaggagtcatccgttctggaaacagccagaggtacaacctcgtgtccaggcaccggccgagttgggactcagggtcaaagccaagctgaggcaacgtcgagatggcgcgtaacagccctcagcctgcacctgccacactgcggaggccccacagggacaatccgggagggtggggtggtgcctgcctggcagctgcgggggctggggagggaagggctactccaccctggaggcccagctcacaccaacctcctagcccctgacgtcccaccaggcagcttcacaaggttacaggtcggttccttctccactggattcctcccacatcgggtgacctgaccacacacacggcaggtgcccagcggtggtcccagccccaacatctcaagagcaggacacccgagtggagatactaggtcacaggaatgtctccacacagacattcaggcaggttcgagggaagaagacagcttcccggccactctcccaccacgcccacacctggtgggctcctctcctcaacctgggcccacattctctcccaggttactcacatcactcagtcatccctcacatcactcacatcgccccatgacatccgcctctgagctgccagcctccctccccagcccctttcttccttccctccctccctccctcctttcttttttttgaaacaggtcacccaggctggagttcagtggcacaatcttgactcactgcagcctccgcctctggggctcaagccttccaggctcaagcaatcctcagcctcagcctcccaagtagttggaaacgtaactgggcaccaccatgcccagctatttttttttttttttcagtagagatgaggtctcactacattacccaggctggtctcagactcctggtctcaagcaatcttctcaccttggcctcccaaagtgctaggattacaggtgtgagccactgcgcccgacttccccagcccctttctgacccacagcctgggatccagcctggactacctggaacacatacccagcccccctggaaccccagctccaccgccaacatgccccacgagccccttccccacatctgctcccaccccagaccagccctccacgcaggccccacgcacgtgcgcagcctggccggtaaggccatcagacccagccggtaaggccatcagacccagcactggcccgccgtgtgacctggcaagggactaacctccacctcgcctccgtttcttcacctgcaacgaggagaccgtgacctcccaggtggttttgctaatcagctgggtgcttggtacccctagagtgagctctccaccgctggcagctttatcgtggctaactcctgtcttcagagtctccatcttggctgctcctgccttaattcaggccttcattatggcgaattggataattagtatccacgaatcctctgcatctggacttaacctccccacgggcccatgagactgtcgtttccctgcttagtcccttggatggctctgctgcctacaggacacaagcccagcccctgcgcccggcacacagagtcctcccgatcctcacgtctctctccttccctccctccccacctgcttcttacccctcagggcctcttttcctcccccctctgacctcctcttcttcccttttcctctcttcctctccttctcatgccccagcataaccagactcccagctgcgcccgatgcccccacacttcctgggcacactgcctctgccgagctgtgcctgctcctgaagtgccctctcctggcacctggtcacccaccctccaggcccggctgccacatctgctccactctgcagcccgggggcctcccccacctccccaggtgccgcagctcacccatggcaggtcctccccacggcaggcccatcccatggcaggcctgtcccacagcagatcctccccatggcaggtcctccccatggcaggcccatcccacggcagatcctccccgcggcaggtcctccccacggcaggtccatcccacggcaggtccatcccacggcaggtcctccccacggcaggtccatcccacggcaggtccatcccgcggcaggtccatcccacggcaggtcctccccacggcaggtcctccccacggcaggtcctccccgcggcaggtccatcctacggcaggtccatcccacggcaggtccatcccgcggcaggtcctccccacggcagatcctccccacggcaggtcctccccacagcaggtctgccccacgctcatccctgccttctacttctacagcactcctcacactgcactgcaatagctgacaccaactatgagctcctggagggcaggggctggcatctctacctcctcagccccggggcctggcacgaaggtgagctgagtgcacacaggaactgaccaggggacaggtcatgcaaagctccgtccagaaagctctgggccttgccagggatccgtgtggttccccaagcccaccctgggtctctgcagccgattggctgcctttgtgctgatgaccctgagctgaaggtcagcagtgtgctggggtgaacggaaggggctcagcaccgcacaagatagctgctccttctttctttggaagaagaaaagccacacgcaggcctcaagacagcaagagaaaaggaggcctcaatggagatgttccgcttgccagactctgagcaaggcagatgttccaagatgccgtgcggtgtctggtccaatcctccgatcccagcaactgcagccaagtccattcctgccagacagccttggagatgcaagagagccgaagcaggcccctcggggcagaagaattaagtgactttttccgggaatttaggaagcttcagtcgctgaatgaaaaaatccatctttgtaatgaggggcaaacactcgtcttccacgtctgaattaggtcaagaggagaaaggacattgtgaggccaatttgcaggcgactgagatgaaatggctcaaggaggctgctgcttctacagctccagcaatggacgggcactgaggattagctttggaaagggagtaggggacagggccgtggaggactttcaccgcacacccatttgggagggaggctctgcaaaaaactgacttctcctaagccttatgcttgtggggatgtgaaatggtgcagctgccacggaaagcagggtggaggctcctcaaacaggtaaacacagaactgccgtatgattcagcaattccactgctgggtatagacccaagagaatcgaaggcagggttgcagaggggtttgcacgctcgtgcccactgcagcattgttcacaatagctgcaacatggaagcaacccaaatatccatcacaggtgagtggatacacaaagtggggtatgcacatacagtgaaattttcctcgccttaaaaaggatggaaattcctacacatgctacatcatggatgaaccttgaaagcattatgcaaagggcacctggttaaactgcagcttctagtttgggaggtctgtgggggcctgagattctgcatttctaatgaacatccaggtgaggtcctcggcccacactttgagtagcagagaccccatcagcacctgaattctctcctagccctaatgcctccacctccaggagcagctctctgtaaactggatggggccaggacccccacagcttcccaaggcagaaggagaatacttctcagaggttagcagactctctctaggcagctgctgcaggcaggtcacaaatcgccaccatctctaagactggaggactggctgctgggaataaagcagtgatggaggctggctgtggtggctcaagcctgtaatcccagcactttgagaggccgaggcaggaggatcatttgagccaggagtttgagaccagcctgggcaacatagcagaccctgtctctacaaaaaataaaaaattttccaggcgaggtggtgcatgactgtggtcctagctcctagggaggccgaggtgggaggatcgattgagcccaggagtttgaggctgcagtgagccctgtttgccactgcactccagcctgggcggcagagctagaccttgtctcttaaaaaaggagcactcctcctgctctgtccatggcttcctggcctcgagtcccagataccaaacagagagggaagctgaagccttaggaaaatggcatgtaccccgccctgcccagggctcctgccagccccctgctgggggtccgggatacggcacatcccttgtccagggctcctgccagcccccctgctgggggtccgggatatggcatgtcccccgccctgcccagggctcctgccagcccccctgctgggggtccgggatatggcacgtcccctgccctgccccaggctcctgccagcctcctgctgggggtccaggatatggcacatcccccgtccagggctcctgccagccccctgctgggggtctgggatatggcacgtcccctgccctgccccaggctcctgccagcctcctgctgggggtccaggatacggcatgtcccctgccctgccccaggctcctgccagcccccctgccaggggtccgggatgactctcagcaggacacatcccctcctcggtgcaaagtgggctcaagccaggttaggggaaaggtcaggttctgacccagccccttccctccatgctgggctgggtaatacctgcccccagcctgagctggacctcctctaagggacgtgggcaaaatataagactgcccagtcttccttcatgaagactcaggtcatcgtttcataggcaggctcccctgcacccacactgtgggacacctttggctgagaccagaaaaaaaaaacgactgcttccctcaaatggtgacaatgcatcccaggctcaggcgggctctgctgtggccctgcccagcctccccatggctagctggactctcagtgagactcaaagctggctgactcagatcccaagcaattaggagcaccagtcctctctaattaaccagccagcccctctcccttcccaccaaggccctcagataatgagggcaggcagtcgaggcatgcaggcccaattacggaggggacgcagctccgaggaccggcatctcggcttccacccacaagctcattagcttgtagctgctgaacgctgccagggctcctgctgggggcgcgtgtgtgtgcccaggagcacctgaggctctgtcctccccaaccatgcctgggcctggatgcttcccacggcagggatctccccagcatcccttctccagcctgcccaagcccacacacctcccagggccccaggctgcagccatccgcagaaggtgaggaggcggaatgtggagatggagataaacagggaggtggcccagaaaccggcagtcccagagtggagggcccgattcctcacaccgtgttagagcccttccagccccccagggctgccgccttaaccccattcccagctgtaattaattacccttaatggtttcacgcctccctccggagcactgggatccgcatggctcctgacaccagtcggtgtgcgataaatatttgtgggataaggaagggatggcatcgtctctcctcccagacacgagagagccctgcaggggcaagggcttcgcaggggctatgtctgggcctccctgattctccagcgactcgggttctaggccaccaccccctacagcagggcccccaggggggcagtgcctctgcgatcatctccctggagtcccaggccctccacacctgcccattcactgctcaaacgcagttcatctcccgaaagactcccctgcacctgcccattcactgctcaaatgcagctcgtcccctgaaagactcctctacacctgcccattcactgctcaaatgcagctcgtcccctgaaagactccaccctcttacaagtcccctacagctcagcgtcccaaagatctcagctctgccctctgttttcaggtccccaggatctcagccttggaggcagctggagcatgccccgtccctcctcctcggtccactgttcctaagtcgaatctgccattgcatcctgtgttcctttttccttcagcacacgcctctgtgctccccaggcatcatcctcacagttgagcacttgcccagcccgtttccagcttccggcctcagcctgtgtggtcttcccctccccggatgcccttccctctgccctcagcctttcagaaacctgcccagcctccaggggcccactcctccaggcagccctcctggctgctctgagtcctgggaaccccagtcccaaccacagtgcacgtcacactagagaatactgtctgcccatcttgacggtcaggacgtgagggaagcgattattctgaaaacctctctttttggatccccccaacccaggattggctcacaatgggcgaagcgatcaagaaagacatttatacgagtaacgagacaattataacgagacatttatacgagcacaaagactgaggcgtttccctgccggctcaggacatccagtgctggagagctacaaaggcttccagaggcttttatgtaaattacagaaaatatgggactagctgtgggagctccaattttaagaaaacaagaattccaacgaggagaatgtgggtgctatggactgaactgtgtcccttcaaaattcctatgttgaagccctgacccccagagtgactgtatttggagagaaggtctttaggaggtaattaaggtaaaatgagggtgcaagggtgaggccctaatccgataggactagtgtctttataagaaaagggagaggccgggtgctgtggctcacgtctgtaatcccagtgctttgggaagcggaggtgggaggattgcttgagggctagttagagaccagcccgggcaacaaagcgataccctgtctctacaaaaaattaaaaattagacaggcgtggtggcacacatctgtagtctcagctgcccgggaagctggggtgggaagattgcaggaccccaggagttgaaggctgcagtgaacaatgatcatgccactgcactccagcctgggtgacagagtgagaccctgtcaaaacacagaaaagcaagaggaggaggagagactagagccctctcctcctgccacacgaggacacacggagaaggcagctgtctgcaagccatgaacagggccctcaccagacacagaatcagccagcaccttgatctcagaatttcgtgcctccaaactgaaaaataaatatctacggctgaaggtgcccagtctgtggcactttattagggcggtctgagctgactatgacacggggagtcactcagcctcttctgaaatgtctggggatctgctccatcgttggtaacacgtgtgtggcctcagcaggcaggaccctgaagaggtttcataacaatcacaggcatcctttactgcacgctgccaatgggccaggcagtctgctaagggcttctcctgcactattgcatccatcaacgatgacagaagcttaatgaccccattttacagatgaaagaacagaggcccagagaggttaagtgacttgtacgagaccgcgccaccgtggccaagctgggacctcaacccaagtctgtctggtcctgcagctccgtgcacaaccacctcacaatcctgcagccagggaggagggaagctagccgtgccaggtgcttgcaggaacacggaggcactcctgaaagtacagatgagtccctcccatctgggcaggagcccccagcactgcgtggcatctgcgtggggacagtcctcactggcaagtccaggagaaccggctgccctcttgctgctcagggtggaccaagcgacctctcattccagccccctgaagtcgagagctctttccttcctagaaccctccttcaccccctctaattcctctccatctgcttagaatacactgaagaggctgacgctctgtctcagcaaatggcctcagtccctacgttgcctgtctccatccctatcatctcccagtgacggccatcaccacctgtctccagcactagggtcgtctcttaaaaacacagatcagatcacacccctgctcaaaacactccactggcatctcattaaacttaagtgaaatctcagctcctgaccttgactggcgaggctgtgtgatgggccatccggccgctcactctctgccccagatgccaccatgtgccccttgaacatgcccagctcgttcctgcctcagggccttcaggactgttccaggggaaacttgccgttccctctgccgggaacactgttccacccagatcttcccagggccagctgttgcttgtgtttgggcctgagctcagagaggccccctaagcctctccctaggtgctctgcgttaattcaacagagtcctcggtgtacctagtcttgcttcatgtttattcatttgtcttctctatgccctgaccctggaaagtcatctccacaacagggtggactgtgtccatctcgttcacggcgtcggcaggacccagaacagggcttgcacacaatgggctattatttacagaatgaatgaagatgaatgaacgaatgacaccaccttctccaagaaggaagagtgaaccctccaaagcccccaaatgcccaccatccagctgtgctcccctaatacactcccctcccacctcaatcctggaacaagcccctcagaagcctcagaagctcaaagattccccggcctcatcacccaagccaggactgagacctcagtctgctcaacaccaagaaccatctgcaacagaaacgcccggaccagcccacagctccagagtagcgtggggacccacatccagctgaggtccttccccaggacagccactgttgcctaagacatggctccaaggagcacctgtactaaccgttgcacagccacaccagcagcggcctctgcagcacaggccctggactgtcccaggggaagtgggccaggatctgtgcctcttcatggtcccctatagctggaatatttaccacaggccaggctctgtgcctctccacaggcccctatacctggaatattcacagcagctgtggggttgagagacaggaggaggaagcacactgccagctcccgttctcccaggcaggagtcactgcccgagtcctgcaagttggccattcccaagtctctgtgccccacctccactgacatgtagtccctctgcccccacctccattgacctgtagtctctatgcccccacctccattgacctgtagtccctatactccacgtccattgacctgtagtccctgtgactccacctccattgacctgtagtctctgtgccccacctccactgacaggcagtctctgtgctccacctccactgacctgtagtccctgtgccccacctccattgacctgtagtccctgtgactccacctccattgacctgtagtctctgtgactccacctccattgacctgtagtctctgtgctccacctccactgacctgtagtctctgtgctccacctccattgacctgtagtctctgtgaccccacctccattgacctgtagtccctgtactccacgtccattgacctgtagtctctgtgctccacctccattgacctgtagtccctgtgccccacctccattgacctgtagtctctgtgctccacctccattgaccagtagtccctgtgccccacctccattgacctgtagtctctgtgctccacctccattgaccagtagtccctgtgccccacctccattgacctgtagtctctgtgctccacctccattgacctgtagtccctgtactccacctccactgaactgtagtccctgtgctccacctccactgaattgtagtccctgtgaccccacctccattgacctgtagtctctgtgctccacctccattgacctgtagtccctgtgcccccacctccattcacctgtagtccctgtgctccacctccattcacctgtagtctctgtgcccccaccttcattcacctgtagtccctgtgcccccacctccattgacctgtagtccctgtgcccccacctccagtgacctgtagtccctgtgaccccacctccactgacctgtagtccctgtgactccacttccactgacctgtagtccctgtgccccacctccattgacctgtagtccctgtgcccccacctccattgacctgtagtccctgtgcctcacctccattgacctgtagtccctgtgctcccacctccattgacctgtagtccctgtgactccacctccattgacctgtagtccctgtgctcccacctccattgacctgtagtccctgtgccccacctccattgacctgtagtccctgtgctccacctccactgaactctagtccctgtactccacctccactgacctgtagtccctgtgctccacctccactgacctgtagtccctgtgaccccacctccattgacctgtagtccttgtgccccacctctattgacccgtagtctctgtgctccacatccattgacctttagtccccgtgaccccatctctattgacctgtagtccctgtgccccacctccattgacctgtagtccctgtgcccccacctccattgacctgtagtccctgtgcccccacctccattgacctgtagtccctgtgactccacctccactgatgtgtagtccctgtgcccccacctccattgacctgtagtccctgtgaccccacctccactgacgtgtagtccctgtgccccacctccattgacctgtagtccctgtgcccccacctccattgacctgtagtccctgtgactccacctccagtgatgtgtagtccctgtgctccacctccattgacctgtagtctctctgcacccacctccattgacctgcagtccctgtgctccacctccattgacctgtagtccctgtgctccacctccactgacctgtagttcctgtgccccacctccattgacctgtagtccctgtgcccccacctccattgacctgtagtccctgtgactccatctccagtgatgcgtagtctctgtgctccacctccattgacctgtagtccctgtgctccacctccactgacctgtagtctctgtgctccacctccattgacctgtagtctctctgcacccacctccattgtcctgtagtccctgtgaccccacctccattgacctgtagtctctgtgctccacctccactgacctgtagtctctgtgccccacctccactgacctgtagtctctgtgctccacctccagtgacctgtagtccctgtgactccacctccactgacatgtagtccctgtgccccacctccattgacctgtagtccctgtgctccacttccattgacttgtagtccctgtactccacctccattgacctgcagtgcctgtgctccacctccattgacctgcagtccctgtgccccacctccattgacctgtagtctctgtgccccacctccattgacctgtagtccatgtgccccacctccattgacctgaagtccctgtgcccccacctccattgacctgtagtccctgtgcccccacctccattgacctgtagtccctgtgactccacctccagtgatgtgtagtccctgtgctccacctccattgacctgtagtccctgtgctccacctccactgacctgtagtctctgtgctccacctccattgacctgtagtctctctacacccacctccattgacctgtagtccctgtgaccccacctccattgacctgtagtctctgtgctccacctccactgacctgtagtctctgtgccccacctccactgacctgtagtctctgtgctccacctccagtgacctgtagtccctgtgactccacctccactgacgtgtagtccctgtgccccacctccattgacctttagtccctgtgctccacctccattgacctgtagtccctgtactccacctccattgacctgcagtgcctgtgctccacctccattgacctgcagtccctgtgccccacctccattgacctgtagtctctctgtcccacctccattgacctttagtccatgtgccccacctccattgacctgaagtccctgtgcccccacctccattgacctgtagtccctgtggccccacgtccattgacttgtagtctctgtgctccacacctccattgacctgtagtccatgtgcccccacctccattgacctgtagtttctgtgctccacacctccattgacctgtagtccctgtgcccccacctccattgacctgaagtccctgtgcccccacctccactgacctgtagtccagggccttggcaaggctgaaggaggagcccgcacagtcttacacccaggcccccatctcccctccagtatttttgggccagttaatccaccttcctcagcccagttttcccttaccacatatgacaaaagcaggaaaagaaatgaggtagctgaagtcctggctttcctgcttactaattgggcaggttaacttcactgtacctttggttttctcatccagcttttgaatgcccctgaaaatgccctcaagtttgccagtggcctgcatgttccacatccacatttatttcttttgacttctccatctttcccggttctctcaacagttcacaccccaccccaccccaccccatcctccatcctccaccctccaccctctgttgtttcttcccagggtttattatttcctgacatcatcttgtttatttgatcattacttgttttttagttcccttgcccaatatcatctcaagaaaattccttctctgtcttcttcagtataataactccagtcttaaaaccatgactagcagccaggcacggtggctcacgcctgtaatcccagcagtttgggaggccgaggcaggcggatcacctgaggtcaggagttcaagaccagcctggccaacatggtgaaaccctgtctctactaaaattcaaaaattagccggtagtggtggcatgcacctgtaatcccagctactcaggaggctgaggcaggagaatcacttgaacctggaggcagaggttgcagtgagccaagactgcaccatttgcactccagcctgggtgacagagcaagactccgtctctgggggtggaaaaaagcatgactagcacatggaagttacttgaggatgggttccagcaaaactaaggtgaaaacaaaaaagaggaagacatggtgtcttgagatcagtgtttctcacctaggagggcagcaaagggaaatcccgttataatagctgtgcagctaccaacctaggaggagcaggagtaagaatctagaagggtttatgccaggaaaaaaaaaatagcctccatatgatagtataattaagatgctaactatcttgaggattagaaggcatattattctcccagaaataagaaaacgaaaggcaagtcgaaactccagaaaaactaaaagctatatttaaaaagtcctagactcaatgcgaaacaatttaatatgtggcacaatttagtataagaagaaaatcaatttgatctccctgcaaagatcattcttctttgagtaaccagggatcaagagaagcaggaccaatggaacagaaagtgtaatcccagcatactgcttggacttcaggaagataggatttaactaataacaactaaaaacattttttccttgttgccttcatatattctggagatgataacatttattgagtgcctatgtaccaggcaaggttttaagagttttgcgttgaagaatatttaatcctcatagcatggtgaggtacatggtatcacgaccacatattacagacaaggaacatcaggtgtgagatattaaacaagttttctgaggtcatagcagaagagctagattcacagcctgacttctaacaccagctctgggtctcgtggctcgggtgtgaatctaccagaagggctagaagatgcctccaagctgagacgcagagctggccctagacatcagtccatttggtttttaagtcttagtgcttcttgccaagatgcagaggataccacatgcccaacgcagacatacacactcctgggagccaggatgcaaagccacagcgcagcggggctggtccaggctgggaagccagaatgacagggccagagcagggtcttaccttcctgcagtctttgcagaacaccgacgagctgcccaggaagcccagcacctccccgcagagcagacactgggacaggccgttccccatcacattccgcctcatggtctccagccgctccaccagccgcctgcagcacaggacacagagtcagagggactgtgcttcctgcctgggcacagttgcactgaggcccgaaaccgtaccatgccacatgtgctgtcccctcacctgggatattgttccttgccccgcccttcccctggataacagcgaatccttcattcactcaccaactattcagtgagcacctatgattcatcagacactgggaatactgtagcaaacaagccagagacagacatggtccctgttctcatggaacttaccttcaataaggaagaaaattcataagcaagaaaacaagcgaactggtttcagatagagagcagcgctatgaaatggaaatagtggggggagggagggggagggagattgaggggagggagggggagggagactgaggggagggagggggagggagactgaggggagggagggggagggagactgaggggagggagggggagggagattgaggggagggagggggagggacattgaggggagggagggggagggacattgaggggagggagggggagggacattgaggggagagagggggagggacattgaggggagggagggggagggacattgaggggagggagggggagggacattgaggggagggagggggagggacattgaggggagggagggggagggacattgaggggagggagggggagggacattgagggacaggggcatgttccatgggaccagcgaaggctctcggagaacacgtggactcacagctgaagaatgagccatgccatctggcctgtctttcccactgtaaagataaggccgggcagggtggctcatgcctgacatcccagccctttgtgaggctgaggcaggcggatcgcttgagcccagaagttcgagagcagcctgggtaacatagtgagaccccatctctacaaaaaaaataaaataaaaaatagctgggtgtggtggtgcccacgcacggtcctagctacttaaggctgaggtggggaggtcgcttgagcccaggaagttgaggctgcagtgatctgtgatagcaccactgcattctaatctacactgcagagtgagaccctgtcccccccaaaaaaaaaagaaaaggaaaagaaagatcaaagatacataggaggccagaatgaaatcaattcctgcccagtgcatttgtgtcttcctacttgtgcttttctgtgtttttcagattttctaggaaatatgaattgctttcgtaattaaacactggacacgatggaagtgctggaagactgagctgtggtcggcgctggaggcggaggccaggagaggcacgtagagccaggcggggagcggctcctgctggagcctttcaggggcgacctgtggcttggcctccacctgaacccctcccttggctgaaccacagctgacctgcaggtgtgcacagccgaacagctcctgggaggcttcaccaggctcattcacgccctcagcatggggcgcacagctcagctagcagccccgtctcacagaggggtgtcctgaggcctcagcgggctgggttacactcccagagttcagacagagcacccttcagcaagggctggagtcagggacctcctcacccactcccagaggtaaatagcaaaaccaggacccggagtgccggcctcccagtcccctgcgcttgcgccaaagcccttgctgtcctcccactgagctggccccggccccgcctcacccgattctctgctgctccaggacgtcgagccgctctgccctctggatgacctgcaggatggcctccacctccgccgggctgaggtgctgcttcctcctctgcttctccgtctggtaggtgtgcacggaccagcccgtctgcagcctcgagagggaacagcacagacggcgtggaggcctccccggtgcaaactccggcagcccctaccacatccaccaagcccccccgagaacagtcagtggacggcccaggtgccgcgtgccgggacgacgagcgcgggcagcagagatggcccaggtggcaacagagatggcccaggtggcaacagagacggcccaggtggcaacagagacggcccaggttccgtgtgccggggttgggattgcgggcaacagagacggggcaggtgctgtgtgccggggacaaggcacatgggcaacagagacggcccaggtgccgtgtgcagggggcaaggcacgcgggcaacagagacggggcagacacaggctccaagcgccagccctgccatccgccagctcctgggccttggcaaagacggcagcaccaccttagcccgggagccagaaacacagaatgtgacgctcacgtacacagagaaggccaaggtcacagcacgagaggtgtcaagggaggagcatgagagattatcaagagaagaaaaagggagctcggagctccgtaaggtagtgagacggagttcaccaggggacaggaaagccatgtaattagggtgaagacacagcgttgatatgaacactttgaaaactagcaggttcgaggcgggggggaagcgagttacagaagaggagccgtggtgagggcaggtgagggcgggcaacggcgaggcagggctgggactgggtccggaggttgagctgtctctgctccactgggctgcgggactgacgcctcctgaggctgcaaatggggcgggggaaggactcaaactccttctatttttctggacagggagagagtggcagcagcagatcaaaccccggagcccctgccctgggtgggtgccagcttccctgagacattccgtgcctgtgacattgctgtgtgcagagatgaacgagacgggaaaagccactgcaccctgaagaactacaatatggtgggggtggcagatgccaatcaatgacacagatacctatttaactaacaggtctaaggcgttttcattctacgcattaccaagtacccgctgggacgcctggcctcttaggtgcccgggacaggctgcttggtgggacgtgcaggtggggtcaggaagtggataaataagagaattacccagcagggaggggatgaggctctggaaaggctcgctttctttagggaagtgtcagaaggcaagagtcctggaggcaggacctagggcagcaggctgagggaggcggaccctttcctgggggccccctgacacaagatgggccccggtggtctcatgtcctgcctggtcccggctgttgcagctaacggttctctgtggccgacacaataggagtttggaaagctaatacgcatatcctttctctgtcagggggagctgggggctgatgaatgtgaagatctagggtttggagtccactggacagtcttatcttctggtcccgtcccttcccagatgcgagacctcggatgaggctctcacccttggttttctgatctgtctctttaagggatgccatgagaattaatgaggcagggtagataaggtgcttttacatagcaaattcccaattgcctgcaaatggtcgttaatagtgataactgtaattatcatggggagggctgtcaggcatggctttaccatgtgtgagcttttgcaggatgaacaggtgcttccccatggaaggagggaggcgggttcaggcagaggagatcacacacgaaaggcagggggcatgggtggtgtgtggtgtttcagggatccatacttctacactgccggtttttccaatttaaaaaaaaaaaaactgcaatgccctagaccaacgctttccaagcagtgctcacggtgctggggaaggaaaataccggggcagcagggcagggctggaaggggggcaaggccagtagagtgggcagcctctgcctggactacctgccttgctcctatgaactgcacacatgcaggggttcaggccccaaaaagcaatatcccctccacaacccctacctactggtttgttccatctgagcatttcggaggctccaggggtcagtgatgggccaggacacacttcgtgtggttcccgggccaggggaagggagttggaagccagggcccccaggttcagggaatcaccactccctccaccctccagctaatgtagagaaaggaagggtcccaggaacacacagaaggagggacagaagcatcagcaccgccaccactgcctgtcctgatggacacgggtcccacgagcttgttctggggctggtgatggcacaggacactacagatgtcttccatcggaccctcacagtcaccccgaggcaggcccggaccctccatcaccccgcgagacagtccagaccctcagtcaccttgcgaggcaggcctggaccctcagtcaccccccaaggcaggcccagacccttacagtcacccggtgaggtgggcccagaccctcagtcaccccgagaggcaggcctggaccctcacagtcatcccacaaggcaggcctagaccctcagtcaccctgcaaggcaggcccagaccctcagagtcgccctgtaaggcccagaccctcagccacgcggcgaggcaggcccggaccctgaggcaccccgccccatttctcagaggaaacgaggtgcggaacgtagctagctagcaggaatctcgggttggcctccaccgctgactcaaggcctgagccctgacctgccgagttcgtatccagcagctgctgacagccctgcttgggagcatttcagtctcccccagggccgcctccgcacccacgttcctgcctccacctgctccgcctccgggccccagtcatccacgtcctctcatctcacctgctgccaggccaggccctgatgcccgcctgcggccatagctccactgagcatgctgcccacccccttgcaatgtcccctccatgcagctgacggaggccgacttgagggcacctgacatcgatgggctgcaacctccaggaagaacctgcacgtctgggagccccacctgtccttcccctgcacgttccccgcacggcgccctcgtctctcagctcaccagtggctcccttgtgttctaggcttcgtgcagtccccaggcctttgctcatgctgcacccttcacctggggcccctgtctctctccctaaaccttctgtccacctctcactcctattctttctttctatctttctatctatctagctagctagctatgtacctatctatctatctatctatctatgtctattttgagacagagtctcggtctgtcgcccaggctggagtgcaatggcacaatctcagctcactgcaacatccgcctcccaggtgcaagcaattctcctgcctcagcctcctgagcagctgggatcacaggcatgtgccactacacccggctaattttttgtatttttagtagagacagggtttcactatgttggccaggctggtctcaaatgcctgacctatgatccacctgcctcagcctcccaaagtgctgggattacaggtgtgtgccaacacgaccggctaatttttgtatttttaggagagacagggtttcaccgcgttggtcaggctggtcttgagaactcctggcctcaggtgatccgcccgcctcagcctcccaaagtgctgggattacaggcgtgagccaccgcgaccggcctattctttttaaagacttctttacacatgaccttcacctggaggcttttccttgatcccctccaaaacaggtaaagaatctactctcagagttcctggaaggcctgggtatacgtccttcattgggctgacacattattacgagacaacatgaaaccctccatctcccctccggaacatgagtctctggaggaccaggccctgcccctggcccctgcctacctctccatcttccttccacactgtccacccttcacattttgcactcacaacacactgacctccggccagggcctccacatgccctgttccttctacctcagggcctttgcacatgctgttccttctgcctggaagcgcttcccccctactcccatctaacattggcccatcttctgggtcccagtgtaggcagcacactctcagcccctcctgatccccagagtaagtcacaccttcacccacgtccccaccgcctgttatcaccgtcaaagcaacttacctgggtaactattcaaataatgctcacctctgcccacctgtgctttaagaccagggactgtgttggtcctgttcactgctgtgcagtcagtgcctggcacatagtaggggtttagaaaacatctggtggcagctggaggactgaggggagccccgagctgcagcccagatatccctgagggtcccacgggacacagctcccagctctgcggctggagtttagtacgcctctcctttccagagactgtgccaggtactacaaggcagtgcaccccaggggaggggataaaagcattctctcttccaaaggggctacgacagcatttggctgctgctgagagagagagaaggtcagggagagctgaagggaaccctggagggtcaggagtcctgctgggccctgtcgagagcacagtggcggagctctccttggaaactcctaccctgcccgggaggacacttcatctgcctggcgtcagaggacagagagggagacggaccgacctcacccactgcgggggccgcatgaaggagccgagccctcctggcgaaggggaccagttaactgtggtgcagattcctgcaaatcacgcatgactccgctctcctggggcgtttcgaattaatctttccatccccctttgatgtttcagctctgtcccctgcaggctcataacatctaattgcaattttttttaatttggtcccacttgggaaatgcttgctcccgtaattggcatgggttgaaggatgaaggggcccttttggacttatcacatgccagagacgcccagcccctctgagggacagcgagggactggaaggcaggcaaggcatctgagaacccccatctccagccacagtgcacagtcggtggagatggcctgacctacccagagctgagaggtcactaggctgagggacagcaggaaaaccagggccaggcgcggtggctcacgcctgtaatcccagcactttgggagaccaaggcgggtggatcacttgaggtcaggagttcgagaccagcctggccaacatggtaaaacccccgtctctactaaaaatacaaaaattagcccattgtggtagtgggcacctgtaatcccagctactcgggaggcaggagaattgcttaaaccagggaggcagaggctgcagtgagctaagatcgtgccattgcactccagcctgggcgacaagaaaaaagaaagccaggacccccaagggaagaaactggaagcaaggaactagcgagattctcaggagagcacagagaaggccctggggcagcttggggctggttgtgcttcagcctcaggggcagcgcctcgtccactgcaacagacttttgttcccccgtctgacagtgccaagcactgggctatgactgggcatccagagatcaaaatctccctgtcttaagggacttgcagtcctacagctcagtgacaggagagaaggcacacgaggtggtgtgggtcccttacagcctgttgatagaaaggacacacaggctaaggagtcagctggacccaggtgtgggttgcagccctgccacccacaagttaagtgatgtgggcaaggagctcagcctcactttgctcatcagggaaatggggataaattctgcatggtagttaaatgagtgaatggctgtgtccagggcctggagtgtggcatgcatccgacaggcacctctctccaaacatctctttctgggcccctgggaatgaatcttgctgaagacaggagaggagcagggaggcagaaggaagggacggcctggggggccccagaggtactcacttggctcgaagggcaagctgccggtcattggggcaaacccactgatcattcccgctgccgaagatggtgtcggccatggctcggagcacccggctgggggtggggagtcacatctgagatgaaggagggaagacgaaagagtgtgcatcattggctggggtacagatggcagacaggttctctgtgccctcaggcccctccacaccatctccatgcacgatccccactgatgcctggaatctcactgtgggaaccatctctccagcaaaacactcttccctcaaggctcctcttcagaaggctcatgattctaggagggtgaccaggtggatcatgtggccgagtgacaagagtgaacatgactggcagggcatcaaaaggttagagtcagaaaggagagaggaggctcacccttagcagttttcaactcaaccctggaggccatctgctccctgccccctcccagtacagcaggggccgaactgagcacgtcacccagcaggaggggctgggctggggggtgatggccagacaggctgggaaaccctactcctttcccaaacctggggacctggctctccttcccaacagactcacaccgatgatcacaatgccctcgagggcaggcaagagggcagggggtggcagctacagccaggattgccacccagcaccatgccaaggggagccgtccatagacactgccatgaaaatggcacctggggatcccccagggaggtggccctgctccaggaccccctgagggcttcacctgtgcactgtctagtgtgccggctttctccctgcctcccaggacaggattgtctttggtggtctgaggatgccacgcgtgcattctgaagggagtgtgggatgaggccgagggtatctgaatcccagagcaaggaggaggggctctcctgagccatccacactctcctggtctaatcccagctaggccagtggttctcaaacccagggcccctttacactcttaaaaaagatccaggttcgaaatccgtttgacacttcctcaaaatgttgaacacagacttaccatatgacccagaaactctactcctagttacacacccaagagtacccaaaacatacgtcctcaccaaaacctgtacacaaacgttcttagcagcactattcatgaccgccaaaagcagaaacaacgaaaatatccatcaactgatgaatgaggaaaatgtgctatatccatacgatgattattatttacaatggattatgatttacaatggattattatttacaatggattattattatttacaatggagtatgatttacaatggattattatttggccgtaaaaaggaatgaagtgctaataccagctacaacatggatgaatctttaaaacatcctaagtaagaaaagccagtcataaaagaccacgtattgtatgattccgtttatacagtgtgtccagaataagcaaatctagagagacggaaggtgaggagtggttgtcaggggttgcaggaagaggggaacagactcccagtgggttcaggacttctttttggggtcgtaaaaatgttctggattagacagtggtgatggtcacacatttcaagaatacactaaaaccactgaatcgcaccctttaaaagtgtgaattttatggcatgtgaattacaacttcagcacaaacacagaccatgaaaaaaaaaatgaattataactcattcacaggccagacatggtggctgaggcctgtaatcccagcactttgggaggccaaggcaggaggattgcttgaggtcaggagttcaagaccagcctggccaatatggtgaaaccccgcctctactaaaaatacaaaaaaaattagctgggtgtggtggcgagtgcctgtaatcccagctactgaggaggctgaggcaggagaattgcttgaaccctggaggtggaggttgcagtgagccgagatcaagccattgcactccagcctgggcaaaaagagcgaaactccgtctcaaaaaatatatagatatacatatattcttgagaactccaaaatacatgggctatgaccattgctagttaccacactagaaattaaaactgagaaaatctttaaaatgttgttaattcattaaaaataataaacccattagacgttcacataatttacatattttatgaaaaactacacttacaaagcaattagacaaatgacactgttttacatttttacaactctttttaatgtttgacttcacaaaaaacagctggaccttcatatctgatttttcattcacgcatttgtggcaggttgtttcgctgaagtccttgaaggacatccagaccctcacaaatacgtatgatggctgaaaagaggaggactttttttactttccagaaattgtaaatatttttctttgatattgcacccaaactcaacagatggtaatttcttaaagattagttcaaatgtggcatctgaaaccacatcaatgaacttctccttttctgtacatttgtgacaggataaaacccagagtcctatgactattcttatggaaacacttttgacctgtggatctccggagggtgttgggggacccccagagaggcctgggcccagcttggagaactgcttttctcggccagtgccacccatttctatgatgaccagcagaggtaacatgcagaccgcctccgcctgaccacacagggtccaggccacaaccttaaccacactggtcgctctaccccatgcacatgtccaggcacctgctcttccagatcagacctgaccctccccagtgagctgcctcagcaaagagacctgggcagccccagaccccaaacagccaagcgtggaaatcccatggccgggcccagatcacccaggacctcctcagatggaggctcaatcttctcccagatgaggctaatggacaagcaaggaaagacaggtcaaaaatgataccgtcctcaaacaactttaaatcagtgccccatcccagcctttagagcactatggtttgctttgctttttaaaaacttcagttatcttgtgcagtcacactgctccacatgggtgtacaaagcattattcttttcaaagtaaacactaaaatatactacagcccacacggggtggctcacgcctgtaatctcagcacttcgggagactcaggtgggtggatcccttgagctcaggagtttgagaccagcctgggcaacatggagaaaccccgtctccactaaaaatgcaaaaattagccaggcgtgatggcgcgcacctgtaatcccagctattcgggaggccgaggcaggataatcgcttgaacctggggggtggaggttgcagtgagctgagatcgcgccactacactccagcctgggtgacagagcgagacataatctcaaaaaaaaaaaaaagatctgtgaaattttggcttttatgtaaacttactagaagtccaggaacaagtcaactgtcttcctgagcctcagtttccccatcggcacccaacagagcttgagacaggccggagcaaccgcctcctgcaatttcaatgcctgatttggaccctgctgagttacatgagggaggcgagggaggcaagcgagggaggcaagggaggcaggcagccagcaggcaggctgctggctgctcccacgtgggaggtgggaactgagccctccccagcccagtccacaggacagagaggaggaggccgcgagaactgcttcctacatgtccccacccctctcactgctgtagcttcagggcagaagagccacagagccaaatgctgcagagatgaagggagacggaaagagccaaatgctgcagagatcaagggagacggaaggatgtcgcctccagagctggggccacgggcagcgccagggcaggttcatcactgatggcaagtctgtggctgaccacgttcacaggggtggccctgagcaaaggtcggacatgaggacccaggagaattcaggccccggctctgggacggctgtgcacccccaccctggccgtggctggcacctcagaaggcacagctgtccttcactcgcacggagcaacctcgggacagatggtgggagaggaagggcaactcgaggaggcacattttaggaaactgcccacggagccagtttcgattctccaaacctcgtcagcatgcagaggctccctgactcggcagcaaggagggcctcatcagccgacccccatgcccggcacccccttcaccagtgggtaaactatgctcgccaccactcagcactcacctcttgggctcagagggcagaaagtctgacccttctctcttaaaagcagggtcctgaaaactccagagagcagtgccctgtgcattaaacacagactgcgcccttgtactcaggtatgaccatttgtcctggacaaaaattaaactgatgagggaacaaaatagggccttatagaaggtgagtggaaaagcagggaaggcaaacccccaaattcaggagggaggatggaattggcctggggagcagaggcaggaggttctgtggacagggctggtggagctctggggggagcagaggcaggaggttttgtggacatggttgatggacctctgcggggagaagacggaggagattttgtggacagggctggtggagctctgcggggagcagacacaggaggttctgtggacagggctggtggagctctggccacttcctccgtaaactagagacgtgatccccagggccaggtctgtctctgaggtcctaccagctgggacaggtaagaggctggggaaggaggagcgtgtgtgtgtgcgcgtgtgtgtgtacaggagcatattcaatgagcacataggtcaaggctgctgatggggaaggcaagcccctcgtggagagggtgggcatccacccaggagcccgcccagaagtgttcagttctatcgacatgaaatttccatttctccttccctgctggaccttgggtgccctagagggtccctacatcctcctccttccctcccttcctgatgcccacacagagcctgctgcaaagtaggtgctcagggaatatccatttaattcaactgtatttcatcagagagatgtggctttcccagacaaggaagaattcagaaaacagcccagacatgctcagagcagacagctggactctaaccaggctctgcgacttgctgactcacaggccgtttgtccctcaagattccccacggggtagtcggcctcaaggcagctccacctgacggctgagctcgctccttgctgaggggctggtgcccccaggagcctcctctgggaagctgagacctcctggtgccacctcgaccccgccgggcgacacacgctgagcagaggcagcactcgggctggccggcccagcaggcagatgttccggaacccttgtaaaaccccgcagtacagggactaggaggacccgaggggtacagggaacggaacaggagttgccggtgataatttcccgaaaaattcctaggggacagaggctcatcagccccaggcaacttcctgagacagatcggtaaaaacaaccccttcttccaggaggatgcaattctctctctaaagtcgagagctcaccaccccgggcgttcgtcactgcagacatcactgcagacacagagacggccattagagctcaccaccccgggcgttcgtcactgcagacatcactgcagacacagagaaggccattagagctcaccaccccgggcgttcgtcactgcagacatcactgcagacacagagacggccattatgcagcctcacgtggtcactcctgggggcggtaggatattttatcctaaagagaaaacaccttaaattctcacatcagccacccccatggcgactcttaacaccttaatgtagcaccttccaacttttcctgggcatttatgtacaaattgtaataaaattgggttcttactgcatacgctgcttgctggtttctaaataaaattgggttcttactatatatgctgcttgctggttttttaaaccaccttgtgctttcccacagtattaaagttctttaaaaatatgattttaaactataacttagtattctgaatacaatacgttttaccatcttcctgtttgggagcacatggattgtttccaattttgctcgattatatgcagcactgaaatggacatcctggcagataaatctctgacgactgccttaggataagttcccaaaagggaaatgaagtgcattttttcagtgtattttttgagataccttttccatagtcaggttcacagccactcaaagctgtcagctgcaggcctcatgcttgctgtctccaaagtgcacgtacaagtgtccactacacaaattctgctggaggcagctgtgtcttggtagcctaatctgcggatctccaattagatggtttcaataaggcagacgatcctctattcgcaaaaaaataaataaataaaataaaataaagggcctcttctttgcaaacagttgcatctacttaaaagaaggcttctatctccttaacagcatttgtgggctcagaagctggtaaagccagcactggcttgagagccctgagtgaccagtggctggggccggtcacatgacacccctccagccgactgttccccgccccgactacagggtcccgtaaacgggccttgggagctcatccccgtacaggctaggaagcagtgcgcatagtcatcactccaggagaaccgcggctcgaccctgaccttccaaaactctcagcagccacagcacagtgagaaaaacaacagccgcccgcagctgtctgtctctaacacgtatcagactttgaaaaacatatccggaggcaaaacaacctgcctcagagaagcccggcaaacacccacggagtctctagcccgtccactgcggggggacagggacaaggcaaccaccccagcaagtgcagctccttctccccacgccttctccgagggccagcccatccactgcggagggacaggaacaaggacagggacaaggcaaccaccccacccagtgcagctccttctccccacgccttcccccagggccagcccatccactgtggagggacagggacaaggacagggacaaggcaaccaccccacccagtgcagctccttctccccacgccttcccccagggccagcccgtccactgtggagggacagggacaaggacagggacaaggcaaccacccccagcaagtgcggctccttctccccacgccttcccccagggccagcccatccactgtggagggacagggacaaggacagggacaaggcaaccacccccagcaagtgcggctccttctccccacgccttcccccagggccagcccatccactgcggagggacagggacagggacaaggcaaccaccccagcaagtgcggctcctccttcttccagggctgtgatcgctccccaccttacaccctggcattttcacctcttcgatcttgtttcagggacacgttcactgatataactgaggcttcagactcctagggtgtggcacgaacgagcgcgctttcatccagccacagggtccgacccacggtgagcgtgggcagcatacccgagctcctgagaccagcagatatgcttggctggggacgcattcccaagagcacagccacactgtgacccccgagcgactgtgacaaagggggcccgggtatgagggtgcaggtgtccgggtgagactatctctatggtgagaataaaggaaatgatgcagggtgaacagtgggaaggaggcggcggacggaggggctgggggaagtcgctgtgcctaggacacccacgtgcgaaggccaacaccagcgctgcaggacgccagttggtgtcggccacagagagagggctcaagtgcattttccacaccaggggtggctggtgccctctgagccgctgcatcacgatgcttagaatgaaatgcacggcccggccaagagtggcagaaccgcccggccggcccgtagactgaggaggggtaataaatggtggtcgtgagcccccacgtttggacaggtatgcttgtcatgcagtgttaccccagcaatatataacggataaaaatggcatctggctgataaaatcccaaccctgacctcaatgtccagaactattcagtttgattttccacttgtggtggaaaggccaaaagaccagacgagggaggcaaacaggagacacaagaggcaagcaaaacccactcccctcccctcccaggtgccagaggaagtaccccgtggagagggcctggaggcttcgcaggtggcgcctgcagggctggaagagaggcttcatcccaagtgctaaatctgagctggcgcccagagggctgggttgaaaaggggctggaggctgcctccagcctccgtaggaaagcatgctgtgatctgttagtcacgtctgcccccggcgtggagggagaacggctgcacatttgctgctgcagagtgtgccatcccactgggcgctgtgcctaggccagggcgacagggaggagatggggtttagaggagggaaaagaagctgggacaaacataaaagaatacttgccaccgagccggtgcttcccgaggcctcgaagacactgtgtgggagcccttcgtccaacacaaggtattaatatccgaggggacccttagcaacagctctgacatctgctctgttactatgacacgggaaacacgaggagggcagcaagataaggtgagcccagacgtcaacatttcctccacctgtcaggcggcgctgggaggattaaagactcagagagggagcctcaaaggcctgtctaaacgcccaaagaaccactcactcggaagcgttgcaggctgactatgcaccaagcgggctcgagtggattccagagttgaagcaggagccccggggaaaccagtgcctgacaaacctccctcaaactccaccgcccccgggcaccctgccaggtctgcctgctcggggcggctccccctcctcccagctccgatgctcctcctctcttgcccagaccgtggcaaatcttcctcatctgccttggaacctgctggggctccccgttgcccctcttcacgtacagccagagagaccatccttacagcccaggtcaggccgtgtgattcccctgctcagaaaccttcggtggctccccactactaaggaaacaagccctagctgccctcaaggccgtccatgatctggcacaaaccacccttgcattctgccagccacccctctgcaaaactggtgctccagccaccaggaccttgaggcattgcagccgcccagccttgtctccggcaccctctcacctggaacgcctttggttcacgctgtctacctcctccacctgggggtggcccagcaccacctcccctgggaattctccagctcctcccatcaggctcccattcggcttgagcccaccgccctcccgtcagcatttcattccgcccgcatcctcgggggcatttacctgttaccccgatgcccagacatggtgggtccagtaccccttcaggggactaatttaaccgtcaagagtttgccactcactggaactacgtacatcggttacgcaccaataatttttttttttgagacagggtcttgctccgttgcccaggctggagtgcagtggcacagtcacagttcactgcagcctccaactcctcggctcccgtgatcctcgcatcagcctcccaagtcgctagaactacacgcctggctaattttttaattttttggtaaagacagggtcttgctctgttgtccaggctggtctcaaactcctgggctcaaatgatcctcctgcctcagcctcccaagtagctgggactatgggagtacgccacgacacccagcctgccaacaaaattttatcttaaaaaccgcctcacggcataaggctcagcctcgctggcctccttaacctgcctctttccctctgccacacacgggctctctacggaccctccagcccctgctaagactcctgcagcctttcttgcctgtgtgctttgaggagcagcaatcctggacatgccacccaggaccccgtccaggaggcaccccaacttggtcacagagctaagcgtctgctcctgtcctcggcaggaccaacagcggcacctctcagtttccttggcctcgttcattcaacacacacacgctgggtgctgacgaggcaccaggcccgtgcccagccgctcagtctcgctgctcgagggctgggcaggggttttttttgtaccccggcaaggcccctcatggggcacacgtaggaggtttcacttaatcctgtgggtcttttttaaccttggaaagtaaatccttgggcatctttaatgactggcaactcccgctccagtggaccccaaatccctgctcgtctcttcatctgacgctgttctcattcccaggcagaaacactctgcaaagcctccaatgcaaatgagatgtgaaataacctacttctcccccatctcaagtgccagccctcagattttaacagccacagctctgcctacgtgtccccagaggcatagcttgcttttgtcttttctgaaaggcctgaaacagtgtaggtggaactgctgtatcaaggcagtcacagagctgaaggtggtgacagcagggaaaccaggctgggcgtggtggctcacacctgtaaccccagcactttgggaagccaaggcaggaggatcgtttgagctcaggagttcgagaccagcctgggcaacagagcaagaccctgtctctacaaaaaatttaaaacttagctgggcatggtggcacatacctgtagtctcagatactcaggaggctgagaaggatcacttgagcccaggagacggaggctgcagtgagccatgattgcaccactgccctccagctgggtaacagagcaagaccctgtctcaaaaaaaaaaaaaaaatttacagggtaaccacacagagagagagagaaagagagaagagaaaatgaaattcaaacttactgcaaacgtgaccagaataatacgtaggtacctgtggcccctgagcactctctgcccagaaaatgcccaagtgctcccaggctgccgggcacctggcttgggacgggcagtatcgagcattcatgctatttgtcttttaatgcagaaacgcaggcctgcttccatttacgtgatgtatgtgggtctggaaagtcccaggcaggcagaatctttgcagaggaaacctgatttcggctcccacctgggaactgcttgttgaaggagcccaagagaaacctctccatgaagcagagaagcttctagggaaaaagaagcctcaaccctcctcacccgcttggaaaaggcccagtcctcaggtgtgctgagggcggtgctccaggccccggggggcagcgtcccacacccctgcctccgccagcagcttctgcacggcccagcccagactccagctcccaggtggctctccgcgggtcctgccaggtacttctccaaccttcctcccctcacctcaccagagccagggtttgcttacagccagcagccaaggccatccccggctgacctcgcctgctatctgtgggcccagctgtctcctcttgctcacagaaacacaaacaggcgtttctctgttgcaactccagggttaggcactgccctgcctgggaacaagctgtccggttctctgcacactacccattctcctggcagaggctaagaccccaaataagtgagaatgcccataagagggccagcggagggctcaggcaacagtgggggccaccccagaacatggcttgctacagagaagacaggcagggggaagggtcagacagaaccactggcacttagctaggagttttcagggcctctaggaggggcccccaagttaacaaacatccctacacgtgcccagcctgaccctgcactaccaaactgggagaggaagaagccgcctccatgggtgctgcccacctgccaggtgcccgccactggctgaccaactggaatcatcacaagccccagaggacgacgtgatcatcactcctttcagaaaagaagaaaccagctcgagaggggcagccacgtgcccaaggccccataagctggcaccaggtgcccagtttggcccaacggagctgggctgagcccaggtgctttctatccccctcctcctcccaaggcgtcgggttgcaggtgcggtgcctacaggtgcctaacgaaagcaatgagccgggtattctccgagcacctgccacacacccagcagcggggagcacagagttcccagaaactgtaagtcgcgcagtaattggccaaacgggagttctgagaagaactgggccggggcagcctgaaggggattgcagaggagacgggctggctgtttcccggagcaggcaggggctgggacctgtgggacctcagtcaccagccctcagtgccactgttgtcccagcctaggccctcagagcagaggcacaaaggagctggtgtctgagccctggggcattttcaaagacagcccctgctccccaccagacccactgcctgaaccaggtgtcacccagacctcctcagtcaccccatagtcctaaggggtccccctggctccaggctccccagctcagacccggccaatcctgccatcagacaggctctccaaaggccccgctccacccaaacacctcaaaatcaagcccagggtcctcagctgggagttcatggccatccacagactccaccgtgccttgccaaatttgtctccagacaaacacacacctggtgtcatacctcatgcccaggcccaggcctccccacatccacactcactgccctgggctcaggcctccccacatccacactcactgccccgggctcaggcctccccacatccatactcactgccccccacccaggcctccccacatccacactcactgccccccacccaggcctccccacgtccacactcactgccccccacccaggcctccccacgtccacactcactgccccccacccaggcctccccacatccacactcactgccccccacccaggcctccccacatccacactcactgcccccctcccaggcctccccacatccacactcactgccccccacccaggcctccccacgtccacactcactgccctgggcccaggcctccccacatccacactcactgccccccacccaggcctccccacatccacactcactgcctcccacccaggcctccccacatccacactcactgccccccacccaggcctccccacatccacactcactgcccccctcccaggcctccccacatccacactcactgccccccacccaggcctccccacatccacactcactgccccccacccaggcctccccacatccacactcactgccccctcccaggcctccccacatccacactcactgccccccacccaggcctccccacatccacactcactgccccctcccaggcctccccacatccacactcactgcccctgcccaggtctccccacatccacactcactgccccctcccaggcctccccacatccacactcactgcccctgcccaggtctccccacatccacacttactgcccagggctgaagcaatcgctgcctcgtcctcataagcacactgtttttacctcttcccagaacttcgcagtttctggtgaacgtgtctgacctctcctactggaccaaacactccctcagagcaggatgcctcctgcccatatggtactgaaaactgtggcactggaatagaactgagagcccagaaataaacccatacatccgtggtcaactgactttcaacaaggatgccgagaccatacgacggagaaagaacagtccttccaacaacatctgctgggacaagtgcagagccacctgcagaaggatgacgtggaccctgacatcacaccattgcaaaatttaactcaaacggatcaaaacctaatgcaagagctaaaactatgaaattcgtataaggaatgtcagggtaaattttcatgacttcagatttggcagtgatttcttagaggacaccaaaaaataggtgtcatctacattttggtgtcatctaagatttggcaatgatttcttagatgacaccatacacaccaaaagaaaaaagagacaaattggattttttatcataatttttttgagacggggtaatgccgtgctgtttaggttcatctcaaactcctgggctcaagttgtcctcccacctcggccccccagatagctgagatgacaggcatacaccactgtgcctggctgactttatcgtaatttgtaaatctgtcataatttacaactttgtccatcaaaggacactatcgagaaggtgaaaagacagcccatagaatgggagaagatatttgcaaaccatatatctcataagggtctagtatctacactatataaataattctcacaactcaacaacaaaatgacaattccatttaaacatgggcaaaggatttgaaaagacatttccccaaagaagatacgcaaatgcccaaaaatcacatgaaaaaagactcaatattgttaaccatcaggaaaatacaaatcaaaaccaccatgagataccacttcacatccactaggatggctacactaaaaaatatgaaaaataacaagtgttcgtgaggatgtggagaaactggaacacttgtatcttgttggtgggaatggagatggtgcagccactatggaagacagtttagttcctcaacaagttaacacacaattatcatctgacccaacaatttcgctcccaggtatagacccaaaagaattgaaagcaagtgttcaaattaaaacctgtacaccaatgctcatagcagcaccattcacaatagccaaagggggaaacaactcaaatgtccatcaactgggaaaaggacaaacaaaatatggtgtatccacacaaaaggatattatttggctataaaaaggaatgaagtatcgattcatgctacaacacagacaaaccttgaaaatctgttaaaagaagccagtcacaaaaaaccacatatatgatcccatttatgtaaaatgttcagaatagacaaatttatagagacagaaagtagattagtggttgcctagggcttgttggggtcagggaagggggacagcaaaagggaatagggtttctgtatgtggtgatgattggtgatggtgattagaaggtcatccatgacatcccccattactctggtgaatgaagaccatctatcccaaattaatatgttattaatttattctcctcatagagaatttatagagtctcattgaccaaccagccagacatgatgctaatctgggttccaaaaacaagaaacaccacgacagatcaaggaaattgttagtgatggaatccaaatgtcaggcatgtaagtttcactataacatttgttccactttgctgcatgtttttaattattcataataaattattataaaagtaaaattacaagtaggtattttgggcattcaacctgtagaaaccaggttcacaacattaggaggacacagacaatgaccttgcaaggtcccacttgcaaaaaaacacatccatgcctgttcctgctccccacaggtgtccacaggcgacacaccaggtgacatggctgcctcagggaagcagaagatgcaggacttccctatcgtggcacaggactgagggctgtggagtcagtctctacgtaaacacattcagctctctgagttcaaaccaagtcagaaaatgggcagagccactgcttttattagctccaaatgaatctggcaagggatgctgggactgacaaagcaggcgctcaaccctgtcacgcactccaggtagccctgccagcaggctgatgaattctcttcttctgacaggtgacaaagggcagtggttacaggtctgggctcagggtcgcgtatctgaggtttgcattctggctgcgaattatgagcttggtgaccttgggcaacttccttcatttctctaaggcttgggtgcatcatctataaatgagtagctgcctcctggggctattgggaagaataaattcaaccggtggttctgaatcggagtgattttgtcccccaagagacatttggaaatatctggagacatagttgcgggtgctattgactactatccatccagtgggtagaggccaggaatgctgctaaacatccctgaggcacaaaacagcccccatgacagagttatccagcctaaacgccaaagcactggagttgagaaaacctgatagaggtggtgtaggtaacacaaccagcacaaagcctgtcacagtgtgcattctcagggtagggccatcatggccatcctcatcatcaccatcatcatcataatattcaccatcatcaccatcagtcatcatcattaccatcaccatcactgtcatctctgtcatcaccaccatcatcactatcatcacccccatcatcaccatcatcatcgtcaccactgtcatcatcgtcatcactatcaccatcattgtcaccatcatattcacctccagtcatcatcaccatcagacattgtcatcatcaccatcatcatttttaccatcatgatcaccaacaccactataatcaccctcatcatcatcaccatcatcactatcatcaccatcactgttacatcatcatcatattcacctccatcagtcaccatcaccaccatcactgtcatctcggttaccaccaccatcactataatcatcaccatcaccatcaccgtcatcattattaccatcatcatcaccaacaccactatcataaccatcaccaccatcagacatcatcaccatcatcacccacatcatcatcaccatcaccaccatcagacatcatcaccactatcatgaccatcacccacatcatcatcaccatcactgtcatctgtgtcaccaccaccatcatcactatcatcatcaccatcatcatgatcaccatcatcatcaccaacaccactatcatcgccctcatcatcaccatcattgtcaatcagcatcaccatcatcactatcatcacaatcactgttacatcatcaccatgttcacctccatcagtcatcatcaccaccatcactgtcatctcagttaccaccatcactataatcatcaccatcattgtcaatcaccatcaccatcatcactatcatcacaatcactgttacatcatcatattcacctccatcagacattgtcaccatcagtcatcactattctcatcatcatcctcttctgtattgggggaaatgcccagaggggctcatatctgggcaggagacctgatgaatagaaagtgtatatactgggaagaggaatcagcatgaggggaaaggccacctggccttgctgagagaggcaggaggcccgttggtgaggccaaatcaaaaaccatcctggcctgtaatcccagcattttgggaggccaaggcgggaggatcgattgagcccaggagtttgaatccagcctgggcaacatggtgaaaccttgtctctgaaaacacacacacacacagaaaaaattagctgggctcagtgacacacacctgtaatcccagctacttgggaggctgaggtaggagggtcacctgagcctggggaggttaagcctgcagtgagccatgatcgtgccactgcactccaggctgggctacagagtgagaccctgtctcaaaggcaaacaaacaaacagaacaccctaaatcccatctgcaaaggtggcagtagctggcaagtctacagccactgctgtgaggactccatctgcctggtcactttcccacctctctaacttctcattgccattagcaggaacttcctcaaacaaaaccaccggggggttcatcctcagagaagctggaagggggaatccctggggtttctacgcctgtatagccaggcttggagaaacagaaacagccacccaggactggctagagaactgagtcctggggcaagtgagaggaggctaggagcagtgccctgaggctgagaagtgggtgcctgctggggcacgcgtgctccccatctgcacgcacaccctgctggggcacgcgtgctccccatctgcgcgcacaccctgctggggcacgcgtgctccccatctgcgtgcataccctactggggcacgcgtgctccccatctgcgtgcacaccctgctggggcacgcgtgctccccatctgcatgcacaccctgctgaggcaagcgtgctccccaactgccccatctgcccgcacaccctgctggggcatgcctgctccccacctgcacacacaccccgactttgcactgtaaggacaaatgggatgccagtgggctctgagtctcgaagaccaggacataagggaaacacaaaatgtcacatgggggaggtgaaaggtttgtctgtcaatgatcaattaggagaaccaccattgagggcttaccatttgcaaggtttagttccaagtgcttatggaatcatctcctttatctttcaaagtaaccctatgaggcaggttttaacaaccccattgtacaggtgagcaaactgaggctcagagaggtaaatgacagctggtaagcgacaaaggcccaggatttgaactccaagcataagctcttaaccacaagcatagtccaacttctcaacacttcatagtactctttgctagacagaactatgtgtgtttggggccttttcccgtcccagttgtgttagtccgttttcacgctgctgataaggcatacccaagactgggcaatttacaaaagaaagaggtttaatggacttacagttccacgtggctggggaagcctcacaatcatggtggaaggcaaggaggagcaagtcacgtcttacataaacggcagcaggcaaagagagagcttgtgcaggaaaactcccccttacagaaccatcagctctcgtgagacttattcactctcatgagaacagcacgggaaagacccgcccccatgattcaatgacctccaccgggtctctcccacaacaggtgggaatgcaagatgagatttgggtggggacacagccaaaccatatcatcagtcatcccatgtacgcacataatcttttttccttctcctttcagataagtcagagacaataaataagattataaatagaaaaacactattttgtaaaatataagaaaacaaacaacagacacttcactgaagatatacaaatggcaaacaagccaatgaaaagatgtccaacatgatatgtaattagggaattgcaaattaaaacaacaagatactactacacacctgttagaacagcccagatccaaaacactgacaacaccaaatgctagtgaggatgtgcggcaacaggaacctcaaacactgtaaaatggcccagccggccaggcgcggtggctcacgcctgtaatcccagcactttgggaggccgaggcgggaggatcacgaggtcaggagatcgagaccatcctggctaacatggtgaaaccccgtctctactaaaaatacaaaaaattagccaggcatggtggcaggcacctgtagtcccagctattcaggaggctgaggcaggagaatggcgtgaacccgggaggcagaggttgcagtgagccaggatcatgccactgtgctccagcctaggcaacagagcgagactccgtcccagattttaaaaaaataaataaataaataaaaataaagccaacctgggcagcacagtgggactctgtatctatgaaaaataaaaaattttcaacagggaaccctcaagcactgcaaaacagtacagccaacctgggtagcacagtgggactttgtatctatgaaaaataaaaacatgtttagccaggcgtgagggcacatgcccacagtcccagctcctcgagaggctgagatgggaggatggcttgagccccagagctcagggtggcagggagccgtgactgtacaaccacactccagcctgggtgacagagcaagactctgttcaaaaaaaaaaccagcccagccactttggaaggtagtttgttacaaagttgactatactcttaccaaaggatccagcaatcacattccttggtatatgcaaatgaactgaacatttatgcaaataaactgaacagttatctctattcaagaaccggcacactcatgttgactaaatatttattcataattgcaaaaacttggacacaaccaagatgtccttcatcaggtgaataaacaaaatatggtaccatatattcatacgatggaacagaattcagtgataaaaaaaatgagctagtaaggctgggcaggatggctcatgcctgtaatcccagcattttaggagaccgaggtggaaggattacttgaggctaggagttcaaggccagcctgagcaaaatagtgaaatcccatctctaccaaaaaaaaaaaaattaaattaattaaaagaaaaatgaggctactctgggcaccctgcctatggggcaacccttctctgcaaggagcagttaaaaaaaaaaaaaaaaacagagctggcaaagggaaggaaaccagtctgaaagggctacttactgcagggttccaactacatctatgacattctggaaaaggccaaactatggagacagtaaaaagaccagggatttgggcgtggaacaggaaggatgaggacatggattgcaggggattttgaaggcagcaaagccattattctccccacatgtccttacacattggttgaagtccacactacctacacctccaagatccaaccctaagtgtacactacacgtttcagttaataataatgtatcagtattaccacatttattgtaacaaatgtacctcaccaaagcaagatgttaatcatgggaaattgaaagaggtaagaggttagacgggaactctgtactttttgttcaattttttctgtaaacctaacactgttcaagaaaaaaaaaaaaaagtaaagtgctaccaaatgcaatgaaaaaaattttaattttcttcttcatagagaaaacaaaaatagcacactaatggtcatcaatgcggaagaatcttgccacgccactaatattacatttgagtgttataccctcccgaatgcttttgtgtggactaatcacaggcgcccatcatccctgtttgctaaaggaggaaggtacgtactgtccatgcctgtgttccatccccaccacgtggccctcccttgggagtgcagaacactgaaaggtcaacaaatactgggccccagttctttcttcaccacatgcatcacagttggaatctgtgtttatttctttgtttacgtgttaatctctggaaggtgcacggggagaagggtcacctccattgtgctggctctgaagagccactgcatattgcacagtgcacgagatgaatccaaaatgaatcagacagcggctccaataaatgctgaggccatgcaaagaacactgggagtgaagagaaggcgcagtgaagatcttgctctgtggcagtcctggagggcttcaaagagaagaatgtggtgcagggctcagagggaaaaggagggacttggcaggcagaaggcggcattccagggagagaatggtcctcccagaagtgccacaaaggaagaggaaactcactcagagaactagggtaattgggcaggagggaaactcgcctgggcaggttagtgactgccctgaggtcacagctcgctggcaccaacttgggcagagctgggaactccgaagctgtagaaacagccaagtgcaccttgagctttcactgaagtcaggctgagaagagaggaaagtgaacacaccctccccatttcacccacatctcccaacatccaggggccaggagcgtgcccagaaattaccagctcaaactcaaaacggctctaaggttaaatgcacgttctatcccaccacatattgattatttcaaaaattaaaatgactgggcacagtggaccatgcctgtaatcccaacactttgggaggccaaggtgggaggattgcttgaggccaggagttcgagaccaacctgggcaatgtagcaagaccccatctctataaaaaaactttttaataaaaataaatgttaaaaattaactaattaattcaatttaattaaaataatgcttctcctccaccttaagacataaccttccaaaaatgtcttccagtaaaatcgagtccaggattatgcaactctagttttatgtagtaatagcagcagcagctgacatttctgtaacaccttatctatatcatcactcacaatctccactgcaatcccatcgagggccatcagcaccctgatattactgctgtgcccagcacaccacagggacagcacacacccacacagaggagcacagaggccaattagattcctccaagttaaatagtgtgtccacagtctcactactgcagatgcgatctccctttcagaggtgtaggtttgcaattggactctacagctaaccagcggtttaatttggggcttgttacatttccctacactccatttcttcctctgtacaacagaggtaataagtaatgcattcctcaacaggttttttccagagtgaattgtggtaacagagtaaaagttccaggctgggcgcggtggctcacgcctgtaatcctagcactttgggaggctgaggcagacggatcacaacattgagaccagcctggccaacatagttaaacctcatctctactaaaaatacaaaaattatctggacgtggtggcacgcacttgtaatccaagcactttgggaggccgaggtgggcagatcatgaggtcaagagatcaagaccagcctggccaacatgggtgaaacaccatctccactaaaaatacaaaaattagctgggcatggtggtgcatgcctgtaatcccagctactcaggaggctgaggcaggggaatcgcttgaaccgaggaggcggaggttgcagtgagccgagatcgcaccagtgcactctagctggtgacagagcaagaccccatctcaaaaaaagaaaaaaaagttccaaacacagtatctggtacctagcaggccctcacaaaacaaaacaaaacaaacccgttttttaaaccaagctggtccctgaatgctggtgaacttctctgcactaaaaggatgaaatgggaattaaaaaaactgtgaccctctgaccgcaggccctgatgatggatgaaatcttggcctgggctgtcagccaaggccatctgggccaaaccatagggcaggaaacagcaggcttcctcctcctgtctgaactctggcccagagaggagcttccttcagctggccgcacccacttccccgacaacattccagaacattccatgataggccaggagactccaggaagaggtcactgagtagctcttagcatctcctcccagcccagccaggagaagatgctccccccttctaggactccatgtacaacttctgaactgtacccctgcccatcacccacggcctccccacagagggccaaggctcagcttgtccacctccgacctacctctctccaacgtctctaggctgccccccaagccagtaagagatgtcctgggtggctgggttgcttgtccttggctatggccctagtttggcttcttaaaccctctttacctgggcccttaactggtcatctgcctccagtcctggtatccactacacataaacgagactcttcaaggactgtcaagaaacactcccctcctcaagcaccctcaatagctcccactgcctcctgaaaagttcagaggccacaccctgagactgacggtcctccacaatatagtcccacacctaccctctgttccctacaggactcacctgctgcaaccaaaatagattacaccaagaatcgtacccacatgtctggacctgtaagtacagacccacctcccatctccacctagctgagtctcactcctcctgcaccccgcctgtctcttccatgagcctctctttttcttgtctctgaattcctccagcatgcaatttccaaagcacaggcctccacacgccaccagccatccccacgtggctcccgtacgattctttacttaatatttccctttaaatcaacccactcttttacttgaacaaatttattttcaaaggaaactgtatatctccaccataaatagaaaaaccatgccatatgccacaaatagaaggcagatgaaaaaaaacaagttatgctctaatacacatgaaaataaatcatcaggaaaacatttttaaatgcttgtccatgtgcctgacgaggtaaacctatatacaggttgtaaatggaacagcacctcgagggacaagggtcccgaaacgggcccctgcatgtgcgtacaggccgtgcttacatcctgacaacttcaactgctcctgaccaagtcaactggccacgcggccttccaaaatcttcaaaaatcccctcctgctctaagacgcgtggccttggcactttatgttctgctttctttgtggcccctgggtttttcggccccatctcacagttatctggggacttgtcaccaaatgtgagtatcccagggtagggagcacagagcctgctgcagcccctgagccagtcttgcacgcagcataacacgcaatacaaacagctctccaacagcacgctctggtctgctccgatgcgtggcccccattctctgcctgaccccaggcccatctgctgctagcgcacaacccctctgccccactcccccaaatccatctctgtccactggggtgtttcaaaggaccacacagaaagagcaacggaggcaccagcggggcatgaggctgttctccagccccggctgcctcttctttagaagcagcaggacctgcggcacgaggctgttctccagccccggctgcctcttctttagaagcagcaggacctggggcagcctggaaaagcaagtttccagtcaacgattaaccagacgctctcccagcaaagacacaaaccttttccccggaagttagcaaagttctgtgaaaacccctgcatgaactgggcccctgactccaggaaaacagaggcatcttccaatgtccttggagccatgagaccccgaaacacctaccgggaacagaggggcttcacccagacaggccccaccagggaggaggaggccgctctccctcccaccaccgttgtcgggggtgacccgaggtgttccagatgaggagctgaatcactgggacttaagtcaataagtggcagccaccaggcaggcccagctggagccaaaccaaggcctggattctcctcgtggatgtctggtaaggccccaccacgtaccccagtcacgtagtctctaaaactgaacagatttgggacgcttcctcttagagggcagccctctttgggactgttagtctggccacttttacacatttcaagcattttttgggttagaaagggcacattttctgtatccaaaacagcccttacaggcagcagtggtggtgcacggggcctgcgtcagcatctcatcgcttcctgaagccccgctgcctggagtggggccccttttgggtgtggctcttcaggagcaaggcaaattgacgcacagagaacttgacagatgtgtaaatggaacagcttcccggaggtacctcgaggagggcaagggtaatgaaatgaatgaaatgaacccctgcacagcgagggagcacttacaccctgacaccctcctgcagggagaaggaagatgacaaggatctctctgttgaccttttcatagtgcaaacaagctactgatagaaaaaagaaaatgttttcatgcttaaaaaaaaaataaacaccatcagcaacctttccccatggggagcagcagcaggtgctaccacaagagagacagacagatggatataattgccaagaggctctcaaactgggttccaaggagccaggggtgtggagaccctcttcaggactgtacaggcgaagcagggggctgggaacaaggccggttattataacccaacaaactgggttccaaggagccaggggtgtggagcccctcttcaggaccgtgcaagcagaagcagggggctgggaacaagggggttattacagcccaacccagagcaactcagctttttcctcgtcatctgtcaggcttccaggtaagacttcatttgaagaaaaggtcctgcagtaaagatgttgagaagtgctgatatgcgctgctggttatatgaaagggtggaaggaggactggcacggtggctcactcctgtaaccccagctactccagaggccgaggcgggtggatcacctaaggtcaggagttcgagaccagcctggccaacatagtaaaaacccatctctactgaaaatacaaaaattagccaggtgtggtggcaaatgtctgtagccccagccattcaggaggctgaggtgggagggtggctggagtctaggagtttgaggctgctgtgagccatgatctagccaccgtactccagcctaggtgacagagtgagacctcgccttaaaatttaaaaaataaaataaaattcatgggtaggccaggcatagtggctcacgcctgtaaccctagcacttgggaaggctgaggcttggccagacatggtcgtgggcaactgtcgtcccaactactcgggaggctgaggcaggagaatcgcttgaacccggaaggcggagcttgcagtgagccgagatcgcgccactgcactccagcctgggcaacagagcgagactccgactcaaaaaaaaaagaaagaaagaaagaaagtgtggaatgtgctggaagccatctctgagtgtgcgggaccacacaccacacacataccaaggcctgtgggagacccgcacaccacagccccaggcctgcaggaatcagctggtctttgtcctgctcatgcactccgtgtagaagaaatgcagaagagaagcctcctttgccagggtccagccaggccacgctgctcttcccctggcaggaccacaggtcgggaggaccaagctcagaaacgcaaatgacaccaaatcaagtggagcctcgagccaagtgaagcttctggaaaagagacttgaacccagcagggacaggggctcgatgcagacgtcagagccagaggtgtggatccagagaccagaggccaaagagatgtgataaactatgtcagtgactggagccgaccctggtcagtccctggggcaggcatggcagcaagaggctggtttccacatgtgcccagagtttgcttcatggaaaggccagctctgcgcaaaggtccaggggggaccagtcacgaaggtgtgaagaggcctgagtgtttgtcttccattcagctgagaaaggcagaacgccgccacactgctgcacagacggcaccttctacacctttacactcctcacactgagctccagggtccggacagctgtgcacctgccacctttagcaaagcgaaggccaggggcccctgctggccttctgcaatgggcatatattttgtctacccagcattcctttcctttttgagaataactcttcaggtcaaagtagtcacgcccagtcttcctgggcaagagaaacagcccctccttccccttcttcctgggtgaatgtgatgaggatgaccaattagaatagccccacccccaaggcagggtaattggctcagggctgggcatgtgacccagacccagccatactgagtcctcctggggtcttgccagagttcctgtgcaataaacccactgtctgggacggtaagcacggcactagctcacgatggccagtagccacctggctcccccttgaaacggcctgtctgccggtgcagctaaacagagctgagagatgaaggtgagtcacctcatacccatggtcaatggctggatccagccgtgcctgaacgactgttttgatccccaggtgccaggcccacagagctgcctttttgcttatgctagtttgaattgggtccttgtcatttgccatccagagccctgagtaagtcacctgcactgtgtgggaaggtgtgaccgtgcaccacacttactaacagtcatcttcacaggcgaccgcgcaccacacttactaacagtcgtcttcacaggcgaccgcgcaccacacttactaacagtcgtcttcacaggcgaccgtgcaccacacatactaacagtcgtcttcacaggcgaccgtgcaccacacttactaaaagacatcttcacaggcgaccgtgcaccacacatactaacagtcgtcttcacaggcgaccgcgcaccacacttgctaacagtcgtcttcacaggcgaccgcgcaccacacttgctaacagtcgtcttcacaggcgaccgcgcaccacacttgctaacagtcgtcttcacagacgaccgcgcaccacacttgctaacagtcgtcttcacaggcgaccgcgcaccacacatactaacagtcgtcttcacaggcgaccgcgcaccacacatactaacagtcgtcttcacaggcgaccgcgcaccacacttactaacagacgtcttcacaggcgaccgcgcaccacacttactaacagtcgtcttcacaggcgaccgcgcaccacacttactaacagtcgtcttcacaggcgaccgcgcaccacactaacagtcgtcttcacaggcgaccgcgcaccacacttactaacagtcgtcttcacaggcgaccgcgcaccacacttactaacagtcgtcttcacaggcgaccgcgcaccacacttactaacagacgtcttcacaggcgaccgcgcaccacacttactaacagtcgtcttcacaggcgaccgcgcaccacacttactaacagtcgtcttcacaggcgaccgcgcaccacagatactaacagtcgtcttcacaggcgaccatagaccacacatactaacagtcgtcttcacaggcgaccgcgcaccacagatactaacagtcgtcttcacaggcgaccgtagaccacacatactaacagtcgtcttcacaggcgaccacgcaccacacacactaacagtcgtcttcacaggcgaccgcgcaccacacacactaacggacgtgcccgacatcttcacaggcacagcatgagccctgatgtgcgctttctgctcctgctcctgctcctgccccttcggaggcctgtgccagtggcagctgggcccggagacaccaggccggcactgctctctttcgaggcacccgtgtttgtgccgacgctgactcccggttgtctgcagcagccacgtggccgaaatggagcctctccacgggggctccttccccagcccctggatggcacagcagcctctcctgtctgtcaccacgtgtgacctgctcccttagtcttcagccgctcatccacgtctgcaggggcatctaactctgtcccagggtatcccagaccctggctcacgccccaggctctccattcaggctccatcgtccacctcagaccatctcgggtttgctggtcttctggactagcgcagccagaaagaacccaggaaggaagcctcacgtctgacacaagaaccttcggtgctaacccgagggcggtatgtgcatcctcagcacctgcccatccggcaccatcctctgatccagggactgtgagcaacagggccccgtggccaggacatctctcaccctccagttaaaatctcgccagttgagtctgcccatgaaagtaggcgctgaactgcccaataaatccacaagtaagagttgcaagaaggagccaaaaagggctgagctgaatgactcatatatgaaataatttgataattaatataaataggaaatttaaagtctccagctgagtgacagaaaacaccttaaaaagctcaagagagaggaaaggaagaaaataaacctataattgcaaaataaaagcattgaaagaagccgtgctcaaggtaagatgctacagatgcaataaattcatgttttaacattagcaacgtgtgggcaacggtgttccctggggaactggctgcatgaagcctctctggagagctgggccaggccagtgggagggcagctggcacggccggggctggtgcggggtcctgaggccagaacctgccggagggccgtccccaaggaccaacaggcacgggagaggcagaatataaacgcagtcagggagtaaaggctgtgcattctccccgggtattgcctccaccacccccgggccacacttgggcctgcccagttcccctagctcttctctttcctgccttgcctgcctaaggcccctctccccctgcactccactcgtatctgcttctccgcctcctgcccagtcagcctgctgtgcagagctcccgcagctgcctcagatccacccttcctgggtggctgctcctccccgccaccgccctaggagcaccccaagtaaaatctggtttttctcccctccaggtctgcctctgcctttgctcctgctatccccagggccccaggtgcccctccctccacctcatccttctggacccagcaaatgtcctccaccaggaggcctttctggacctcctcatcctcctggaaggagcctctcccaccccgaagtcctttaactatttacttgtccctctccttcgtactgagcttatgctgtatttgtttatgtgcttatcttctactgggctcatctctgtaacctttttattcttttattcattcattccacaaatactaattgagcacctactatgtgccagaccccatgctaggactggggacacaatgatgagcaagacagacactgtccctgccaccctggaactcccatcttggagagaaacaacaaaaacaaaacacgaagcaaataaacattagtaaacacgtcaggataagcggcgatataggctgggatagaaaggtgtaggtgatgtgagaggcgagtgtccgtgcggacagaggagctgggggaggagactctgaggccagaggtgtgagcggagtgagtcgggcacgctttccagacacaaaatcggtgtttgctaaacatgcgtggaacaaatgagtggctaacaagccagaaatcccaagcgcgtgccccgtgtcgctccagacacaacttccccaccctcatcaccctgtgggtcactccgactggcacccagacgcgtttcccagcccacacgcctgctacagggcccacctgtgtcaccctcgcagaggcgcttaccaggactcaaggggctctccgctcagaacccctcatggcctccctgacaccaccagcggccctcgggctggacagcaagcgggttttgtctcgcctgcagactccagccccggagcaccacgcatggaagcgcagcgaggccgcccctgggctcggtgggaaagagccctgatcgactggtggcgtctgccaggggacggcagaagacagagaggcacatttgccacgtattttccttgtcacccagggctccgcaaatgaccactcaggcaagaaatctccttcaggtctaattgcctggacgagcattcagtatctggtgccctttccttatgggccacgtgaaccacgtcactgatttttttttcctgctttgactgctcattagctcagagctaaatgtgtggttcaaacacagcaaagtatatacagctcgatggcctgaatagggggtctaactctccccctgctttcaaccttctagctaatctacatctatgtctttcctgatcttatttttttgatctctatttagttacatgtccatatacatacacacatatatgtatagacatatataaacagacatacatacatatataaatataaaatatctacatataggtctggtatgtaatacctactttactttttttctatgaatgtatcttttagatatatagatatattatgaatatatcttactttaaaaaatagagacagggtctcactatgttgcccaggcttggctgaaactcctggactgaagcgatctgcctgccctgccccccacaaagtgctgggattacaggcacgagccaccatgcccagccattaacatgtctttttatatttattttttatatttcttctcccttttttttttttcagagacagggtctcactatgttgcctacgctggtcttgaactcctgggctcaggcaatcctcttgcctcagcttcccaaagtgctgggattacaggcacgagccactgcacccagcctttatatttcttatataaataaaatatatagagagatatacatatattcttgtaagcaccctcaattcatttatggaacaagatagaggaataaatggatagatgaataaatgacagacaggaaataccaacgcagaatgagacaactttgctcaaagaattcagaatacagttagctgcattctgtcatgaacagagtctggagttagagatcagaagccaggctctcagtcccagctcggaccagctacatgactgtgaagggaaacaagttacacacacacacatccccgcaagtccttaccccggccaatctgaggctttatcaattattaaatgtctatcatctaatctgcgctgctcacttcccctggtggtaacagaaattacatgggaggttcctgacagcgccgtcaacaccagcctcacgcacgacactggcctcattattagcattggagacaacactccaggcagcccgcgttcaacgataaataataagacaccaagccgcacggcctcctactaaatgctgcaggaattcaaagagaaaggagccctcagaacccacatctgcattcagtgtcctgcccctctgatgtctgagagcagcgtctgactgaaggacttggatctcttgcttctcctagtaagaagcaagtcccagccaggatcagtcgcaaaaaccctcaggactggaaacggctgccctggtatggagcaaagggctggggctctgacagcccacagcagtcccctgaccgcactgtcccctgcagaaaggccagcacagcacgcatcacccgtgggccaggtgaaagaggacaggccaaggctggaaaccgtggggcgctggggcaggtgacccctccgtgtgcctcccacatgacctcacagacctgacgcctgcgtgtgcctcccacatgacctcacagacctgaccccagcgtgttcctcccacatgacctcacagacctgaccccagcgtgttcctcccacatgacctcacagacctgaccccagcgtgttcctcccacatgacctcacagacctgaccccaacgtgttcctcccacatgacctcacagacctgaccccagcgtgttcctcccacatgacctcacagacctgacccctgcgtgttcctcccacatgacctcacagacctgacccctgcgtgttcctcccacatgacctcacagacctgacccctgcgtgttcctcccacatgacctcacagacctgacccctgcgtgtgcctcccacatgacctcacagacatctcctgtcccccatcacaggcccatgtacagtcaccagggtttccaggcacctgaatccgcaccactgggttttaaatcacaggagaaagtgagtcaatgacaataacaagaatccttttcagcaagtttgtcaggcggcatggaccgtcctttcttttctgggggaagtgacggaattcacaaagctagtaagattaacactaaattctggaatgttccctgcccagtcaagtgctgaaattgaaggcaaaaaaaaggaggggtgatacacagtcgaagggctgagtttgccaatcagttcaagttgagaggtgacagcgtgctggcagtcctcagagccctcgcttgctctcggcacctcccctgcctgggctcccactttggtgacacttgaggagcccttcggccctccgctgcactgtgggagcccctttctgggctggccaaggctggagcccactccctcagcttgcagggaggtgtggagggagaggcaccagtgggaaccggggctgtgtgcggcgcttgcgggccagctggagttccgggtgggcgtgggcttggcgggccccgcactcggagcagcgagtcagccctgctggccccggacaatggggaacttagcacccgggccagcggctgcagagggtgtactgagtcccccagcagtgccagcccaccggcgctgcgctcgatttctcgccgggccttggctgccttcccacggggcagggctcgggacctgcagcccgccatgcctgagcctcccacccactccatgggctcctgtgcggcccgagcctccccgacgagcgccaccccctgctccacagcgcccagtcccaacgaccacccaagggctgaggaatgcgagtgcacggcgcaggactggcaggcagctccacctgcagccccggtgcgggatccactaggtgaagccagctgggctcctcagtctggtggggaggtggagagtctttatgtctagctcaaggtttgtaaacacaccaatcagcaccctgtgtttagctcaaggtttgtgaatgcaccaatcgacactctgtatctagctgctctggtggggccttggagaacctgtgtgtggaaactctgtatctaactaatctgatggggagtggagaacctttgtatctagctcagggattgtaaacgcaccaatcagcaccctgacaaaacaggccgcttggctctaccaatcagcaggatgtaggtggggccagataagagaataaaagcaggctgtccgagccagcattggcaaccagctccggtccccttccacactgtggaggctttgttctttcactctttgcaataagtcttgctactgctcactctttgggtccacgctgcttttatgagctgtaacactcaccgcgaagatctgcagcttcactcctgagcccagcgagaccacgaacccaccagagggaagaaactccgaacacatctgaacatcagaagggacagactccagacgcgccacctgaagagctgtaacactcaccgcgagggtctgcggcttcattcttgaagtcagtgagaccaagaacccaccaattccggacacaaagtgaccaaatagggtctcatgtggtttattcctagaggccgacggatcccaggcagcaggttatccgaagaaaatgggaggggactttgaatacaggtaacctcgccacacatcaacgatgtcccttcccctccatagctgacctcgccagccatcaacgaccttccttccctccctggccttcctgtagctgtccagccaccttcaggggtgggctccggaggccctgagtttacactgcggccagtcccctggggcacagctggctcttccaggggagcacctaagccaaactggcacatcaaggtccctcccttaagaatccgggaaataaggctgggtgcggtggctcactcctgtaatcacaacactgcgggaggccgaggaaggaggattgcttagaggtcaggagttcgagatcagcctgggcaacatagtcaaaccccatttctacaaaaaaataaacataggtcaggcatggtggctcacgcctgtaatcccagtgatttgggaggctgaggtgagaggatcgtttgagtccgggagtttggggctgcagcgagctatgatcataccactgcactccagcctgcgcaacagagcgagactctttcttgaaaaatttaaaaaataaattaaattttaaaaaagtaaggccaggagtagtggcccacacctgtaatcctagcactttggcaggctgagataggatcacttgagctcaggacttcaagacgagcctgggcaacacagtgagacacagtagagccttgtctactaaaaatttaaaaaaaacagccggggccgggcgcggtggctcacgcctgtaatcccagcactttgggaggccgaggcgggtagatcatgaggtcaggagatcgagaccatcctggctaacaaggtgaaaccccgtctctactaaaaatacaaaaaattagccgggcgcggtggcgggcgcctgtagtcccagctactcgggaggctgaggcaggagaatggcgtgaacccgggaagcggagcttgcagtgagccgagattgcgccactgcagtccgcagtccggcctgggcgacagagcgagactccgtctcaaaaaaaaaaaaaaaaaaaaaaaaaacagccggatgtggtggtgtgtggccgggtgtggtggcgtgtggccgggcgtggtggcatgtggccgggcgtggtggcatgtggccgggcgtggtggcatgtggccgggcgtggtggcgtgtggccgggtgtggtggcgtgtagccaggtttggtggtgtgtagccgggtatggtggtgcacacgtgtggtcctagctactctggagactgaagcaggagaatcactttagcctgggaggtcgaagctgcaatgagtctcattcatagatagatagatggatggatggatggacggacggacagatagatatacacagggatatatacatagagtttcatagatagatgacagatagacagacaaaaagcaaaaagaatctgggaaatggggtaagagacggagtctcaactcaactgccttttgcagtaagatgcacactgaggctgaggccattttcccctcatggaaatgtccagttgacagaaacggaaaggtggcctgcagtgagaccgagaagaggggagccaacatggagctgaagcaggacagagagaggggcccctccctctagcatttgtgctccattcagcccctccaggggcctgagcgttgaaatcttcctcagcttctatgagatactccagggccttggcagtaaagttccctttttgtccagcctctgctgtttgcaaccagccccagtgagccgcaagtcctagctggcctgattaatatcatgtccactttcccaccacccttccatccagcaaaaccacctcacgccacgctgagctgactgagaatacctgggagtattcaaatcagtggccgggggagaacaaaggtttcggtggcagagggacccaggtccgggtccatctagcacagtgaccttgaataaacctcccgaagcgtaatctcctccatctgggctgctgccgatacctcctcaaatccactcccggccctccctggtctcttctcctcactatccccacagtgagctccccaaaatgtcagcccttgccaggtaacgcgcatttaaaaaagaaataaataaaaataaaaaacaaagcatcagccctgtcacggaactgccagcctgaaactgccccagtggcttcctactgttctgatgatacaagcgaaatcctccccccaggggcctgaggtttcctttccacgccgcgcgctttcccctgggggccaggaaccctgattcttctgcctgggaaatgcttcccccaactctttccccacaaccccttttgcctaattaactctttaaaattcattttgtcaacatcattattgagatagaattcacaaaccacaaaatgtaccttttcaaagtttacaattcggtggttttttggtacagtcacagggttgtgccaccattaccgctacctaattctagaacattttcatcactccacaaagaaacccatcagcagccgggcacagtggctcacgcctgtaatcccagcacttcaggaggccgaggcggaaggatcacctgaggtcaggagttcgagaccagcctggccaatatggtgaaaccctgtctctactaaaagtacaaaaaattagccaggcacggtggcggtcacctgtaatcccagctactcgggaggctgaggcaggagaaaggcgtgaacccgggaggtggagcttgcagtgagccgagattgcgccactgcgctcagcctgggtgacagagcgagatgccatctcaaaaaaagaaagaaagaagcccattagcagccactccctcccattcctcccttctccacagtccccagaagtcacgaatctgctttctgtcttattaatttgcataatctggacatttcatataaacagaatcatataataagtggtatttttattcacgatttcatttttcagctctaatctctattatttctttccttttgcttgctttgggtttagtttgctgttctttttctagtttcttaaggtggaagattatttatttgaagtttttcttcttttttaacagaggttcttacagctatacattttataggttttgataggttatattttcattttcattcatctcaacctactttctaatttctctgtgatttcttcttcttctttttagagacagggtcttgctatattgtccaggctggtctcaaactcccggactcaagcagccctcctaccttggcctcccaaagtgttgagattacaggcatgagccaccgcacctggcctaatttcttctttgacccattggtgtttgtttgtttgtgtttgtttgttttgagacagagtctcactcttgttgcccaggctggagtgcaatgctgtgatctcagctcactgcaacctctgcctcctgagttcaagcgattctcctgcctcagcctcctgagtagctaggattacaggcgcctgccaccacaccagctaattttttgtatttttaatacagacgggatttcacaatgctggccaggctggtttcgaactcctgacctcaggtgatccacctgcctcggcatcccaaagtgctgggattgcaggcgtgagccaccatgcccagccaacccattggttatttaggagtgtgttcactttggacatttgtgaattcccaaatttcctttattgatatctaacttcattctactacagttagagaacgtactttgtatgacttgaatccttttaaatttattaaggccaggtgcggtggttcatgcctgtaatcctaacactttgagaggccgaggcaggcggatcgcttgaggccaggagtttgagaccagcctggccaacatagcaaaaccccatctcctccaaaaatacaaaacttagctgagcctggtggtgcaaacctgtaatcccagctactcaggaggctgaggcatgagaatcacttgcacccaggaggcggaggttgccaagattgcaccgctgcactccagtctgggtaacagagagagacttcatcttaacaaaaatcagtcaggcgtgaaggcacgtatctgccgtctcagctacttctgggaactgaggtgggggactaccagagcctggggggttgaggctgcagtgagccgtgatcatgccactgcactccagcctgggaaacagagcaagaccagaaaaattaccgagtcttgttttacggcctaacatatggcctctcccagagaacacctcccgggcacgtgagaagaacgtgcgtcctgtggttgctgggtggcgtgttctgcagatgtctgtcctgccgggcacgtgagaagaacgtgcatcctgcagttgctgggtggagagttctgcagatgtctgtcctcccgggcacttgagaagaacgtgcatcctgcggttgctgggtggagagttctgcagatgtctgtcctcccaggcacttgagaagaacgtgcatgctgtggttgctgggtggagagttctgcagatgtctgtcctcccaggcacttgagaagaacgtgcatgctgtggttgctgggtggagagttctgcagatgtctgtcctcccaggcatgtgagaagaacgtgcatcctgcagctgctgggtggcatgttctgcaggtgtctgtcctcccaggcatgtgagaagaacgtgaatgctgcggttgctgggtggagagttctgcagatatctgtcctcccgggcacgtgaaaagaacctgcatcctgcgattgctgggtggcgtgttctgcagatgcctgtcctcccgggcacgtgagaagaacgtgcgtcctgcggttgctgggtggagagttctgcagatgtctgtcctcccgggcacgtgaaaagaacctgcatcctgcgattgctgggtggcatgttctgcagatgcctgtcctcccgggcacgtgagaagaacgtgcgtcctgcggttgctgggtggagagttctgcagatgtctgtcctcccgggcatgtgagaatgtgcatgctgcggttgctgggtggagagttctgcagatgtctgtcttcccgggcacgtgaaaagaacctgcatcctgcgattgctgggtggcgtgttctgcagatgtctgtcctcccaggcacatgaaaagaacgtgcatcctgcggttgctgggtggcgtgttctgcagatgcctgtcctcccgggcacgtgagaagaacctgcatcctgcggttgctgggtggagagttctgcagatgtctgttaggtccagttgatttacagtgttttcaagtctatctcattgttggttctctgcctactcattctatccattattgaaagtgggaccttgaagcttccaacgattattgttggattttgtatttctcccttcatttctgttggttttggttcatgtattttgggggtctcttgttaggtgcatacagctttataattattaggctttcctgataggttgactcctttgtcattataaaatgtccctgtttgtccctagtaacaatttttgccttaaagcctattttgtctgctacttgtggagccacttcaccactctttcggttactgcttgaacggaatatctttttctgtccttttactttacacacatttgtgtctttgaatctaaagtgtgtctcttgtaaatccgttctgccatgctctttttattggagaatttagttcatttgtatttaatgtaattacagataagataggatttatgccattttgctagttgctttccatatgtcttgtctttttattcctatattttcccatttctgccttcttttgtgttgaatacgtattttctagcataacccttaatgctcctcttccattttttaaagttattttcttaatggttgccttggagactacaattaacattttaatttaaaacaatctaacctggactaatactgacctaattgcaatagtacacaaaacctttgctccaacatcgctctgtcccctccactcctttgtgctattattgttatacaaattatatcttggtgcattataagcccatcaacaaagttttaacaagcattgctttccgcagttatcttttcaatcagacagaagaattactagcagaatatactcacccctttagatgctccttgtatcgtcatatggatttcagtcaccgcctagtgccctttcatgtcggcctgaaggattctctttaggatttcttataggccatgcctgccagtgacaaattctctctgtttttattatattaatctaggatgtcttaatttctccttttttttttttgagacgcagtctcgctctgtcgcccaggctggagtgcagtggtgcgatctcggctcactgcaagctccgcctcctgggttcacacgattctcctgcctcagcctcctgagcagctgggactacaggcgcccgccaccacacccggctaatttttttttgtatttttagtagagacggggtttcaccatgtttgccaggatggtcttgatctcctgacctcgtgatcccccggcctgggcctcccaaagtgctgggattacaggcatgagccaccacacccggcctcttttgaaggatagttttttgtggatatagaattctttaaagaattttttaaattctttcagcactttggctgtgccacccactgcctcctgctttccagggcttcagatgagaagtcagctgtgctattaatcttcatgagtgttccctgcctcattaacactcaccttcaattctgaattcaaccgtatcttcctccctggcccaggccaggccctttgataccggcacctcgttcctccataattcccctttgtagtgattatcacagttgtaattaaacaattaatgatggacagagctctttcctgtattttcccatcactagaatgtaagttccataaggcaagaagaaccaggcctgccttgttcaccattctgttgcccgaagctgctcaacgcctggcacactatgaactctcaataaatatttactgagcgaacgactgacactcatcctagagtaggctacatgactggtctcagcttctcactccctgcagtggtgtaaacagccacaccatgccagggcctacaagtaggcagtgtacatccctgccctgtgttgaggttggctgtgagccttgtgttagctaatgggatgttagtgaatatgatgtgaaaaaaggctggaaatgtacatgtacgattgagctggtcctcactgtgctcctcctgtcaccatgagacagaacaggccttgggtggtctctgtgctcctcccgtcaccatgagacagaacaggccttgggtggtctcttgtgctcctcccgtcaccatgagacagaacaggccttgggtggtctcttgtgctcctcccgtcaccatgagacagaacaggccttgggtggtctcttgtgctcctcccgtcaccatgagacagaacaggccttgggtggtctcttgtgctcctcctgtcaccatgagacagaacaggccttgggtggtctcttgtgctcctcccgtcaccatgagacagaacaggccttgggtggtctcttgtgctcctcctgtcaccatgagacagaacaggccttgggtggtctcttgtgctcctcctatcaccatgagacagaacaggccttgggtggtctcttgtgctcctcctatcaccatgagacagaacaggccttgggtggtctctgtgctcctcctgtcaccatgagacagaacaggccttgggtggtctctggtccaaatgggatcagagacacatggaacagacctaaacccacttggagcttgaagtcagccaagtcctcctgcgggcagcctaggtcagccaaacctcacccaactccgagctacgtgagagggaaataaatgctcactgtcatatgccagtgggtttggggcagcttgttgcatcccaatatggtggcaatcgatggctaagacatatgcccctgtgagtctgaaggctgggagtgagtgctggcgaaggtcttcatgtggcccacaattgggtccagatgagttccataggcagatccaccagcctcctctgtacttacagaataaagttcccagaatcctacagtcccgcaactcatctctggtgccagcagctcctggagtagcccagagtgtactaagcgcggagtaccatgccaggcacacagtaggcgctttgctgagttaggctttgtccttctccaccttccccctcaccaattccaccactgggcctgagttcatctgcacagatgaaaatctgcagttcttcctccgttgtggggctggactggcgggggcagggggaggcaccctcacctgtcccaggagctaaccctgcttactgcctcaatgacacccagactcaagtgacgaggcgagcctgggccctggacaccaggtctgtgcaaagtgaggtcaccccgcaggtgagtcctggctgcccccttggcctgtcctttctactctgacttggagcatgaccctgatggaaattttcagttccgtaaaggaaattttgattcgatatagggcctttttactcccaagtttccccctttgctaaattagttcccaatccctctgccaagggtgactctgttcaccctctgatgctgaaacctgaagaggggtttgtgaggagtctgaggccagcccagccctcacggtgcttctgtgcaggatcagaagaggtgcccctcatggcggcacttgtcttccacctggttaaaaagcaccataataaaccaataatgttaattccattcattagaaagttaccaacaaaccacacaaaaagctccttctaggcagacccaccacatccagaactacctgcagctctcgccgagcaagacgctcaaagcagttacctcctcagcagtatccccacgatagaccgctgtggtctgaatgtttgcgacccgcgaaagctcccgtattgaaaccctaacaccccaaggcatgaggaggcggggcctttaggaggtgattaggtcgtatgggcaaggtcctcataaatgggattagtgttcttgtaaaaggggcttttctaccccttaagattaaggtgttataaaacccaaagggagggactcaaaccactgttgccaaatgatgactgagacagtgttagatctaacttgaccgactccgtcttgctcctaacctccaagctgcccttgttcattcctgggcgtaggctgaactaactttaggagaaacttagtttatagtttatagtttaaacaaagacggtaacagccctttcccaaagcagacctccttcttccccggggactagtctgcctttgtaggactaactttagccccaagattagaaattatggtttagcagtcatgcagctggaggctacaagattctgaccctccctagctgctcctaagatcagcgcttgagatattttggaaaccctgcacttgatggatcagctggcaccacccagatcaataaactggctcatctgatcttgaggtccccacccaggaactgaccgagcacaagaagacagctttgacttgctgtgatttcatctctgaccaatcagcactcctggctcactggcttcccccacccaccacgttatccttaaaagctctgatccctgcatgctcggggagactgattggagtaataataaaactccggtctcccacaaaaaaataaataaacaaaagaggcttttaaggaagcccgttggcccctcctgccatgtgaggacacagaaagaaagcaccatctatgaaccaggaaatgggccctgagcagacacagaatctgcccacaccttgatcttgaacttcccagcttccaaaccgtcagaaataaatgtctgttgtctataagccacccggatgatgatattttcatacagcagtctgaatgggctaagagacttcatagcaaagaaccatgtcttgtttctgctcagctcacgtcggaagtagaaggtcataacaagccagatggtgtgagaaaggtcttcatgtccagatgggcatcactggaccccgagaagtggtttctgcaaatgagggaagcccccagcaggattggaagtggcaggtaaagaaaggtcactgcaggaatcagctctcaaaacaggcggtggtggtggggaggggaggggcgaacgctgggaaaatacaggcaactgagcggctgcttcgagacccagcctggacggatttggggttagagatagtttcacattcatctgtgaacctcacccatggcaccttctccttaatcagatgctccccagaccctgacattaacaaggacatgagctgtcagaattcagagaccggttgaaattgggccatttcttatcactaatctgtgtgattggatgacattgaaaaaagaaaccagaagagaattcatttcctttttcatttttaaacgaggccccacttagagcagaagagtttaggtgttgggccttcttaagcaaacagtcctcaagggatggtctgcaccaaacaccccctcacctaatccctgacactctacatcaaggagcaagaggaatgaacctggtttccaaaaattaagtccagaaaagaacatgcattcctacatctcaccttctaaattaagccagtgttctccattaacgtcccactggggactgagagaaaattgtttcaaaactgggaactaaatttaaagttaggaagaaaaaaaaaataacactttacgagtcccaaatgtttgaagtagtttgttacaaactttcaagtcagatctaaagtgactgcctgtttgagagttcacattgtcagcccaggaatccaactgtccaaatggggtcatgtacaaactcagggattggttaaaggtcaattacaccctcagttttagcaatacaaggggtatactccactaaagttttggttctcgtagttggctgcgcacactgtatccactggggttgtaagcaacagaaatcaagtctgcacgacttaagcagaaaggaatgtactggcagaataccttggggatacctcgtagctcagaaccaatcagaaggctgaagaccctgatggaaactgcaacagtctaaggccttcaagtcccatcaccttccactatggaagtagtggctccaaaatcctttctccccttgcttcactctgccaagtttcagatcccggagtggacagcccagcaaagtagcctggcgtgggcccaggtcccatcccttgagctgggtgatgactacatggggtgtgtccaccttgtgaaaatgcagaatacttctgatgcatgcagttttctgaagagatgctacgcttccttttttttttttccttttgagacagggttttgctctgtcacccaagctgaagtgcagtgggacaagggtcactgtagccttgacctcccacctcagcctcccaagtagctgggactacatgtgcatgctaccacacctggctaatttttctatttttttagagatgggtttttgccatgctgcccaggctagtctcaaactcctgggctcaagcaatccacccacctcagcctcccaaagtgctgggattacaggcgtgagccaccatgccaggcactatgcttcaattttttaagaaaaaacgttcacctatcccatgaccgagcaattccactcttaggaaaagtaaaacaggtaagagggccaggtgcaatggctcacacctgtaatccccagcactttgggaggcgaggcgggcggatcacaaggtcaggagattgagaccatcctggctaacacagtgaaaccccatctctactaaaaatataaaaaattagctgggtgtggtggcgggtgcctgtaatcccagctactcgggaggctgaggcaggagaatggcgtgaacccgggaggtagagtttgcagtgagccaagatcgcgccactgcactccagcctgggcaacagagcgagactccgtatcaaaaaacaaacaaacaaacaaaaaaaacaggtaagagaaacaaagtatatgacgggaatgaaaaacaaggtcaacatgaatacttatggccactccattgataatagccaaaaatgaacacagcccagaggtccatcaccaggtgaatagataagcaacttatacatactcatagcaaggaatactgctgaccaaaaggaagcaactaccgacccaaacaacaactggggtgaatctcaacaacgtcatgccaaatgagagcgagagacgcctttcacaaaagaacacacgttgtatgatcccatttacatgaagttccagtacaggtaaaattaacctatggtagctgggtgcagtggctcatgcctgtaatcccagcactttgagaggctgaggctggaagatcacctggggtcaggagttcaagaccagcctggccaacatggtgaaacccagtctctactaaaaatagaaaaatcagctgggtgtggtggcacacgcctgtaatcccagctactcgggaggctgaggcgggagaatcacttgaacccaggaggcggaggttgtagtgagcagagatcgcaccattgcactccagcctgggcaacaagagtaaagctctgtctcaaaaaaaaaaaaaaaaaaaattaatctctggtgaaaaaactccaaagagtggctgactgcagggggagtgggacagggattgacggggacggggtgtgagagtgactgactgcagggggagtgggacagggattgacggggatggggtgtgagagtggctgactgcggggggagtgggacagggattgacggggacggggtgtgagagtgactgactgcaggggaagtgggacagggattgacggggacggggcgtgagagtgactgactgcaggggaagtgggacagggattgacggggacggggtgtgagagtggctgactgcggggggagtgggacagggattgacggggacggggtgtgagagtgactgactgcaggggaagtgggacagggattgacggggacggggcgtgagagtggctgactgcggggggagtgggacagggattgacggggacggggtgtgagagaatgctctgggacagtggtcacgttctctattttgatagcagcctgggttgcacaagcctgcgtgtttatctgagctcatcagatggagcaggtaagatttgtgtatttcgttgcatgcatgttttaccatggaagaaaaataccataaacaactactgaactttagttcatggtaagcttactgaagcatttgactattttgttcaaaagatgcattaagatagataaaaagcaagccacaaactgagagacatatttgcagcataatagacatctgattagtaccagtacgcggacatacggagatctcctacaaatcaataataatctaaaagggaaaaaatgggtaaagaaaagtgcagtgtgcagatgagctaatacttcaagtcagttagggaaagagaaggatacctcaaatctagtaacaccagttcctggacccgaaaggctgagggataaaggaggaggaagactctcaccatttgcctttttacacctttagaattttaaatgacatgatttttttttttttttgagacagagtctcgctctgttgccaatgctggggagcagtggtgcaatcttgctcactgaaacctctgcctcccaggctcaagcaattctcttgcctcagcctccagagtatctgggatgacaggtgccagccaccacacccagctaatttttgtatttttagtagagatggggtttagtagagatggggatgaccatgttggccaggctggtattggactcctgacctcaggtgatccacccgcctcggcctcccaaagtgctgggatgacaggcgtaagccactgcacccggccccttaaatgacatgctcataatgtatcttccaaaaataaattaaatttaagtttaaaatacagcttgtgggcaaagaaagtgaactgaaataataggtcaacaatttggaaagaaagaaaatcgaggtcttcccttccatcacaaaacaaaataaattttgattggattagcattgaaagtcaaagagagctgaatggaaaggctgaaaccaaaaaagaacctgaagaaaatatagaactgaacatttatctgaacttggggtgaggaaaacgtttcaaaccccaaaacagagggtttttgaaaaatcataagatgaaaagactgatggacttaatgaaatgcattagtcagttcaggctgccatgaaatatgcagacagggcggcttacacagctggcatttcttctcacagtcctggaggctggggagtccaagatcaaggtgccagctggctccgattatggcgaggcctctcctcctggcttgtggacatggtgagggcccaggggaagggagagacagagacagagagagtggggagaagagggggagagagagagcaagagagagagagaaggagagagaaagagagagggagagagagattgagaaaaggagagagagacagagattgagaaagagaaagagagattgacaaagggagagagaggcgaggcgcagtgtctcgtgcctgtaatcctagcactttgggaggccgaggtgggagggttgcctgagcccaggagatggagaccagcctgggcaacacagcaaaaccccatctctgttataaaacattttttttcagtttaaaaagagagagagagagagagattgacaaagagagaggttgagaaagagagagtggggagaggggagggggatggggaaggggagggagagcgctctccagcatctgtgtttatacggacactaacgtattgcatcagggccccacctttctgacctcatttaaccttaattacttcctgactccacacacagctgcactaggggtgaacgccacaacccaggaatactggggaacacaaacgttcagtctgtattaccacataaacatttaaaccttctctatgtttaaaaataatcgtaatacttggtatgcaacaagatctttaaaaagagaaaaataaccaaagaaaaatgccaaaaggaggggaaaaatgtttgttacatatgtcagtcaatatagagaaatcaacgcaggttaccaaatcatgtctacagtatcatctccatttttaagcagtaaacactggctatctctggaggttgggaatcacggatttttattttcctctttgtgctttctgcattttctaaattttccacaatgaacatgaattacttttataatttaaaaaaaaagactttttttttaaagaactcttatgtgaaagtcaagcaacatccaggcggacagtccagttctgcacagactttaggggatggctggtgagcctggcagagcgtgagcaaggagccggcaccacagacccgggaggccatgggctgtattaccctatagacaacaggaaaccctggaggtgcccagaggaggagggcacaagagggaacgtaaaccaatgaaactcttgccccatggaaaagggaaggtgtaggctccagagggacaacaaaggcagatttcagctcaaaagagggaagaatttccaccttctgagctgcccctgaatgcaaagcattatgcagtgaagctctctgtctcagtccacctaggactcagggaccaatggagcaaagaatctccactcaggaaggggtttagactagacatcacttttttttttttttttttttgagacagagtcttgccctgtcgcccagcctggagtgcagtggctcaatctcagctcatggcaacctccacctcccgggttcaagtgattctcctgcctcagcctcccaagtagctaggattacaagcgtgtgttgccacacctggctaatttttacatgtttagtagagatggggtttcaccatgttgcccaggctggtcttgaactcctaacctcaggtgatctgcccaccttgtcattcatgttcttatataaagttctaattccttttcaacgttgcgcagtagcccaaggtatgaaaatacaagtctacggagctgtctcaccacgaacaaacattcagactgtgtacgatctttcaccaccacagaccgtcacaaaggctgtcccagaagttgtcacctgtgcacaggtgccagcatttctttagggtagatcctgagaagtagaatcactgaatcactatgtcacagggcagctgcatttattttaacagttctcaccaaactgcatccaccatgatgttcctttccaagcctcggatcccagagatttacagaccccatctctatgatatgtctccttgtcggcttcagccaggcattcatacctccctgggatactccaggcctcagtgcagctctgtggctcctccttactatgaaaaccatcacccaccccgagacaggctgccgacatcatcggcagccttggagcacagcccaaatggtcgcccatccggctactggtggagaagactcttggatgaggaaggcaggcctcctaactctgagatgctgcacctctgtcagtcagggggtactccatcactccatccatgagtgagaaggaggggctgggcaagaggagactaaatcctggcgtcactcaacggcttggatgggccagaaccaaagatgaaaatgcaccaacatgtaaatttagccatgagcacagctgggtgatggagacaggaccggatcgtcagtatccaacacgcaactgattaagtgtccatggtaaaataagtgctcttacacgaggtgctaacgacgtaattgcggtcttacataaggtgctctggtattttcagcagcagataactgccatgtgaatggagaagccgccctcccaatgaatgctgcttactgtacaggctggcacaggccttgaaatgccagtgctttgcaggcagccagctgctgtcagaggggtgaggatgtctgtgcccggggctgcagctccgctcgtgttctgcaatttctacaggctggccggactccccacagccagctgggggtacacacatcaccgtgcttacacccccaagcatcccaaaagcaaggaaaagggccacttcaggggctctcccaacccaagcagccaccttgtagctaagagagctctccccagacccagcagggtggaggtagacaggaagaaaccagagccagcccgggctcagctgcctcgttcccagagctgacccctccggagcctaggtgctcaccctcatgtcacctcccacctgtcacgagaaacccaaggctgcaggtacagtgaagtcaaagtggcctcttggaatggtgtgtctgtattcacgtcccgggtttaggatccctgcagccttttttcctgtttcgctccattgtattaagtctaacacatacacagaggagtacacacatggaacgggtaagcgttggcattgatggaaagaacgcagccctctgactgacaccccattaaaggaaccaggcagtaccagcctcccggaagcccttctcatccctcccggaagccctcctcatgcttcccggaagccctcctcatccctcccggaagccctcctcatgcttcccggaagccctcctcatccctcccggaagccctcctcatccctcccagaagccctcctcatccctcccagaagccctcctcatccctcccggaagcccccctcatgcttcccggaagcccccctcatccctcccggaagccctcctcatccctcccggaagcccccctcatgcttcccggaagcccccctcatccctcccggaagccctcctcatccctcccggaagccgtcctcatccctcccggaagcccccctcatccctcccggaagccctcctcatccctcccggaagccctcatccttcctggaagccctcctcatgcttcccggatgccctccacatccctcccggaagccctccacatccctcccggaagccgtcctcatccctcccggaagcccccctcatgcttcccggaagccccccctcatccctcccggaagccctcctcatccctcccggaagccccccacatccctcccggaagccctcctcatccctcccggaagccctcctcatgcctcccggaagcctccccccacatccctcccggaagccctcctcatgcttcccggaagccctcctcatccctcccggaagtcctcatccctcccggaagccctcctcatgcttcccggatgccctccacatccctcccggaagccctccacatccctcccggaagccgtcctcatccctcccggaagccctcctcatccctcccggaagccctcctcatgcctcccggaagccccccacatccctcccagaagccctcctcatccctcccggaagccccccccccacatccctcccggaagccctcctcatgcttcccggaacccctcctcatccctcccggaagcccccctcatgcctcccggaagccccccacatccctcccggaagccctcctcatccctcccggaagccccccacatccctcccagaagccctgctcatccctcccggaagcccccccccccacatccctcccggaagccctcctcatgcttcccggaagccctcctcatccctcccggaagccctcctcatccctcccggaagccgtcctcatgcctcccggaagccctcctcatcgctcccagaagccctcctcatacctcccggaaaccacgacccccacttccaacaccgtccgtgcatttggcccttttggcactttatagacgtggaatcaggcaggacatgctcctttctgtctcgttccttttactcgacattgtgtttgtgtgattcatccacgtatgctgtgtggtcagattgttccttctcaccacagtggggtgctccattgtctgccttcaccccagtttatgtgtccattctactgctgataaacattgtaggatttccctggggggtggatttggctattacaaatagtgctgctatgaacattctagtatatgccttttcactgcaacccatcctaaaatatacatcattgaaaactactgctttaagcctcaaatcttgggaaagccaatgtgccccacctctccaatttaccctttcattctttaaacatggtccttccactgtctacagagcaccatgtaaagggtattggccatctccttgaagtctgggtaataaaaagatgaaaaaaaaattttttaaagactattggccaaaggagtcagactttctaggactaaagttccctccttgctgtgtgtctttggacaaacactcaacctctctgtgcagcagttttcttacctgtaacatgggaatagtactctaacatcatttggctgaggtttaaacaagggagcagcatctgcacaaggtgagcactcatcagtgttcatagcaatgattcctgctgaaggtatcctgtctttctcaacacccctgcagtaccctgctctgggcgtcccctgcccggatatctgtgagcaacgtcctcaaagaaaaggagatcgcaactgaggacaagcaactctaccatctccagctagagctgagctccaccagcaagccctcccttccacgccagatcactcctgtccctcagcctctccaggcatcagagatgtgtggcggccgcagctactgtcctttcatgcatgaggcactggatgtcactcaaaatgggacctcgaccacagtgactttgctggggtcattattaatggtgtgccagcggcctgatgacaacctgctggggcacccaaagtacccaaaaatcactgcctgggaaaaaaatgtttttaaatgttgatgcaaaagaagagtgaactggagtattttgtttttttagatgacaaagacggaagaaatcccctcaaagcatacagtgcaagaggcccaggagcaggagattccagccttgcaagaccggttgccatggtaaccgtgtttcacagcaggagttcgttttcatatgacagtgacctgcacagagaagggaaggacggaaggacgtctcctaaagaaacttagttgaaggctttcccatttggggtgaggggagttagttttgtttacaaaaaaagggcattttaaggtgccttaagaggcagaaatgatcccagggcccttgcaaggttctctctattcacaactcttacttaaggcaagacagaaaaacacggcctgtttccaaggcctcctggggctgatgtcatagcctccctggatcactggtcccatcattaaccatctgtttgttacaaagtcctttcctggagtccagcagagtcccaagcaagcaagcaaccaaccgagccaccaggaagtcctgcacacctgggccaggggctgagaagacatggaaatgtaacacacactccctggactgaaaaacacgccttcctggacaaacggcaaatcctagcatctaaaaacagccttaggagtcagacagacttgagttccagcctccaccttggccacctatatgctgtgtgatttaggaaggtctctggccctctctgtgtccttatgaacagaatgaggacaataatcctaatgcttacccctctggatgtttctaagataaaggaaaacgagggactacctggaatgattagcacactgcccggcacgggacaacccactcaacaaacagctgcaatgattaagagctggaaaagtatatctcgcactcatgatacagtgggaggctaatagcagagaacaaaatactaaaccgtgtgggacaacctgcaacggatccatcaacaagcccagcaggaacgcagatggactggacgaacggaaccgtccaggagggaggtggtgcttgaactgaactctcaattgtattaaggatgctggggaggtgttcttggaggcctgagggtgggaatgcctccattgagtgcttgcagggcgcccagtcctggagagccagagagaaggggaacaagcttcccgctgccatcagggacagaaggggatgtgagatcagccgacagctgcagctggtggcctgagggcatcgtggagtgggaagggtccccggtgcagccagggaggtgagcaaagccagggaagggtccccggtgcagccagggaggtgagcaaagcttttccaaggaaactgcacctgagccaagtcccagagggtaggggcgagagggcccaaccaggggcaggaggcaagaagcttcaggattggaaattagtttgagagaatgaggccacgtgactgagggccttcaaatgcaggcaggggagctgagctttgcccaggaggacatatggagcctctgaagatatctcggtggggcgggggtcggtgacagggtgaaacgaaccatcattctagaagggacatgccggatggattgccacatggggctggagggggttcccacaggagagagaacagctaagaggcctctgtactctggactgagatgttcaaggcctgtaggaatccatcacaaaggagaggggagaggcagacacattttggagaccagtgtaaatgacagagaatgagggaaacccaccagcgggaagtgagtgagggcagctgcctgggaggagaccagtcgggtgcgctgagtttgcggtgacaccgtggcacccagagagcaagacagggtgggctggaagtcagagggggcattcccagaggactcctggagccagccccgtgagaagtacaacacagggcctgggaaaacagtcccaggaaagagggaaaaaggctcagcaaaggagaaggaaccaggagagaggcatgcccagaagtgacggcggggaggctgcaagctggacaccagcgcgcaggggtccgcttcccggggagagcgaccgaggcaccacagaagaggcgtgtttggaaacaaaacgacttttgggtttagaagtttcagcaaagtggccaccagcagccaggctgcagaggatggaggggggcggctggcggggagggggcggctggaggggagggggcagcaggtgccgagctcttgtgggaaaacgtgacagagaaaagaggaaacaagctgacggctccgatgccgggttttgtgtttttcaggagatgggagatgggaggccgaggggatgtcagagacgcggagtgggggtggggctgggggctggaggcggcccggggcgcgatctcccccggtgtcgggcggggcggggcggggacgggactgcagtcctggctctacccacgcgcccaccagggtctgcaggggcgtccccagggctccccctgccctcaggctgccgggagggtcaaaggtgcgcgctgcacagatgtagggtgacagtgaccattccccggaatctccgtggctctgatctccccggggacgggtctccacctgcagcaagacgcctccccgcaggacgacccccaaggtgttacggacccaggcgaccctggggtcgctctgccctctgagcagccgggcaggaggcacaagccccagcgcccccggcagaggcctccgtgcggcgcaggaaaggaaaggcggctccacggcgggcccagagccgtcgtcccgagcagtgaggcgcctgggacggatggaagcgcttccccgacgcctccgcccgactccgggaagcggctttgggagggctggaagccaaccccgcgggactcaggctggaagggatgggcggggcgagtggaggcgtcgtcggtctcggctgtgagaagggccccccaaatcctgcacgcacgaccccccttccgaccacccagccgcgggcgaaagcccaagtgtgcagggcccggggcccccacgggggcccccagtctcgtggggcgtcgggtccacgccgcaggcgaggccaggtgcagaggggcggcagcctggacccccgggcccctccccgcacgtgcgcgccggggcgggcgctgggaaacgccgcgctgtggactcgctccccggaactcacccggcgccgccctcccccaccccccgccgcgtccccgcccccccccacccgcaccccgagctgggggcaccacagggtccccgagggtccccgaggtcggggcggagcgcaggccgttcggagcggggggctccgggcccgggcgctgctcgggggagtcgggtgcagcccaggctccggccgccggcgggaggaaacccagctccaggccctgcccgcgccccgccggccccggaaccgcccccgcccggggcgccaagagctcccaggtccccgccgcctccctgtgcgccccgccggccccgccgctgagccgcgcgcaccccccgccctcggactgggccccggacccggggcggccccgcttcccccccggactcacccggggttcggccccgcagcccgcgcgctccctcgctgccctctggcggcaaaaccgtgaaaccggcgcccgccccgccccgccccgctgggacctgtggccgcagagcccgggccggagggcacctgctgggcggcctctggatggtgacctcgccgcggggcgggtccccacggtctcgctggacggcaggggcgcggctcactgcagcctccgcctcctgggctccagcgaccctttcaccccagcctccccggcagtcgggaccgcaggcaccgctcccacgcccggccaatttttgtatgttttgtagagacgaggtcccactgtgttacccaggctggtctcgaactccaagcctcagtttctttatgtgcaaaacagagacaacaatagtcctgttgtgatgactgaatgaggtcgtgaccccaggtctcgctcactgtaggcccctcagctggagagcattcttaatgttaatattccctcctcacctcctaaccctaaagcctcaagggtgcaggaattccgctggccttagcccaccccccagcccccaggagctgctcgcaccgccgcttgcacagacgggggtagaccactccgtgtctctggggtgactcgaccttccttgggatggccaaccgcctgagaaagacgcataggtgacccgaggctgcctccctgaagccttcctcttggctatagctgtacccctgtggagcccacacgaacccaatcgcccaaccttctattcaccattacagctttcagtaaacactcgttgcacctctgctctgtgccagctcttcctagacgggattctcacatgtttcacttaacccctgttttcccaggtcttaccacataaggtccgaatgacagtaacaaaaccatctttttctgtctgtgccctgaggatagctaacaggtgaacacaggtgcagcctcctggctaactccagaaaccactcccttctctcctgccccagcgtttgtccccttggcccacaaggcagcacactcaggaccgttccactccccttcccccgacccagtgtgaggcggcctcatcctctcatggtgggtggggtgggggggctcctgcatgctcactgcagagtgggggctgatgccacacaggtgttcacacgtgtgcaccccaccctaaccagccaccgggctgcacagcccctcactccacacgtgtgcaccccaccctagaccagccaccgggctgcacagcccctcactccacacgtgtgcaccccaccctagaccaggcaccgggctgcacagcccctcactccacacgtgtgcaccccaccctagaccaggcaccgggctgcacagccccacactccacacgtgtgcaccccaccctaaccagccaccgggctgcacagcccctcactccacacgtgtgcaccccaccctaaccagccaccgggctgcacagccccgcactccacacgtgtgcaccccaccctaaccagccacccagctgcacagcccctcactccaatgtcatggggaggggctggtgatacagcccttttactaactcctcttcccataatctaggcaagagcctcattccccatctactcaatgacattcaaagtggtctcctgtctttgctttttgctccttggtccaagcaagctcatttcttctctttcttcaaataaattactgggattactaatagagagacagacagacagacagacagagacagagagagagagagatcttgctagccataaatccaacgattctctaaataaggcgaactcttcatttactcatcaacagataattgttatgcacagttgcaggagctggggatacagaggtgaagagaatcccctgcctccaaggagcttgctgtctagagaggggagcagacttcaagtgaataaatgaacactactgggcacttcctattgtctaggaatttctactaggagcgctgtcttagtctgttctctgtttctataacataatgccaccgaccgagtaaattataaagaaaaaaagtatattcagttcatggttctggagcctgggaagtccaagagcatggcaccagcatgtggcgagggcaggtcatctcggtggaagttagaaggcaaaagccagtgtgcgcacagcggagggagagtcgccagggtcagctcactttagaacaacgtgctctcatgagacctaactcacttctgccagaacaaaaatttttttttttttgagacagagtctcgctctttcacccaggctggagtgcagtggcacgatctcagctcactgcaagctccgccttccaggttcacgccattctcctgcctcagcctcccacgtagctgggactacaggtgcccacgaccatgccccgctaattttttgtattcttagtagagatgggatttcaccatttacaggatggtctcgatctcctgacctcgtgatccgcccgcctcggcctcccaaagtgctgggattacagccgtgagccaccgcacccagccctgccagaacactattaacccattcaagagggctcagccctcatgacctagtcacctcgtatcaggctcttattgaacatgtccaccccctaccactgttacactgggattcagttgccagcacataagcctttgggatacattcagacatattcactgaggtggataagtgataaggaccttcactgctcaacaggagctgccagatacccttcaagactttccaagagggaaccaagctggtcctttgcccctcactccctccccactgataccagaggaccgtattccttgggaggggagctacccaggcaacaggtcaacaggttatgagaagacaagtttgtctttaaccccacctgtgttttcccttcacccacaccccccccgaccccaaccagaagatccttccaagaaatcaaggctgcctgcaggatggccctctccctccccagaagcctggctggcactccacagctccaggagcagagtgtggggtcctggagttcgggcgcagtaaccctgagcagggttactcagccacagcacgattgactttttcagccaggtattcctctggggggtgagggggctgtcctgtgtatggtacaatgtgtagcagcatccctggcctctaccccctaaatcatagtggcacacatccaacccccagctgtgacaataaaaaatgtcttcgggtgttgccaaatgtcccccggggtcaccctcccacccccaccccaccccttaacccaaaccatgtgtccagagcctgttacctatttctagcctggagaattaggggtgaggaaactgctctgtgcttgcagtagtgcggcaaaactgcgtagagatggagcaggcctccttcccactgttgaccagacggagcgggcccgccttcccaccctctgaccaggcggagcggccccgcttcccactcttgaccaggcggagcggccccccttcccactcttgaccaggcggagcaggcctccttcccactgtctgaccaggagagtttcccaaaagccaagtagaaactggaagaaagcgggggtcaagcagccttgaagaagccccgggggcaagggaacccgtcaccagaggctgagatgcgcctctggagaggatcaagaggccggcctgaggatgtattacaaacgggctcccgggaaatcctccgatgcccagatctggagaggatcaaagcagaaggatgacggagaaagagaagagagccctccttccacctgccagcacctgcactgcagggaagaggggggggtggaattggaaaaaagaatgaaagttggatttaggtcgggcacagtggctcacgcctgtgatcccagcactttgggaagccaaagcaggaagctcaaagctcacttgagcccaaggaatttgagaccagcctgggccacatggcgagcgccgtgtctctactaaaaataaaaaaattagcagggtgtggtggtgcgtgcctgtactcccagctacggaggccgggcaggttgaggggctgaggtaggaggatcgcttgaacctggcgggtggagttgcagtgagccttgattgcgacactgcactccatcctgggggacacagcagaccttgtctcagaaaaaaaaaggaaagaaactcggatttatagatctagtaggttgaatgatggcctgaaaaatatatgtccacatcctaattcccagaacctgtgactgtgactttatttggtaaaagggtctttgcagacataattaaattgaggctgtcatgatgagatcatcctggacatttcgtaggccctaaatccagtgacaagcatcattataagatgtacgtagagactagaaggcggccctaggaagatggaggcagagattggagtgatgcagccacacgcccagggacacctggggcccccagaaacgggaggaaggaaggacggattctcccctgcagcctccagagggaggaccaccctgctgacaccttgatttcagccttccggccgccggactgtgaaataatacatccattttgttttaagtcagccagtttgtggtaatttactagggcagccccaggaaacaaatgcaacaggagactagaatttgctcgagtggagacagtcttcagcaaagtctacttttcattctgacacttttttttgagacagagtctcgctctgttgcccaggccgaagtgcagtgacgcgatctcggctcactgcaacctctgcctcccgggttcaagtcattctcctgtctcagcctcctgagtagctgggactacaggcgcatgacaccacgtccggctagttttttgtatttttagtagagatggggtttcaccatgttagccaggatggtcttgatctcctgacctcgtgatctgcccgcctcggcctcccaaagtgatgggattacaggcgtgagcccccacacccggctgttttgtgtgttttaaactttacataaatggtatcatactgtatgttttgttttattttgttttcttttgtttttaagacagggtctcactctgttacccaggctggagtgcagtggtgtgatctcagctcactgcagccttgacctcctgggctcaagcgatcctcccacctcagcctcctgattagctgagactacaagcacgtaccactacacccggctggtctcaaactcctgagctcaagtgacctgcctgcctcggcctcacaaactgttgggattacaggcgtgagccaccatgcccagtcatgctgcatgcttttaaaaattgaggcaaaattcatataacatacaattaaccattctaacatgtatcattcagagcattcgcaatgttatccaaccaccacctctctctagtttcaaaacgtttttcaatcaccccataagaattttgatggttaattttgagtgtaagtttgactggataagggatgcccaggtggctagttaggcattatttgggggtgtgtctgagagggtgtttctggaaaggatttgcgtttgaatcgtggactgagtgaaggtcaccctcaccaatgtgagtgggcacatcatccagtcaggtagggacacagcaaaaaggaggggaaggatgaacttgctctctggtcttgagctggggcatccaccctctcctgtcctcgaacagtgaaactcctggttctctggcttttggactgaattctgtcactggctctctggttctccagctggcaggtggcagattgtgatacttctcagccctcgtaatcgtgtaagccaattcccgtaataaacctccacatacaaggaagataatataagaacattctttttctctgagcactgtcgacgggggtggggcaagaatattgtatgtccatgaaatagtcactcccaatgtcgccctccctgcaactcctgcaaccgttaacccgccttctgtctccatggatttgcccatttgtattcttccaaaacttacaggattctggctgcacattcgagggatttgtacgggtggtcacgttagaccattgtttgtttttcattgccatataatattccatcatgaaactcaaccactttttttttttttttcttgagagagggtctcattctgtcaccaggctgcagtgcagtggtgcatcctggctcactgcagcctagaaatcccaggcttaagtgatcctccggcctcagcttcctgagtagctgggactgtgggtgcaccaccacacctggctaattttttaaaaaaattaggccaggcatggtggctcaggcctgtaatcccagcacttcgggaggccgaggtgggcagatcatgaggtcaggagttcgagaccaacctgatcaacatggtgaaacccgtctctaccaaaaataccaaaattagcaacatgatggcacgcacctgtaatccctgctactgaggaggctgaggcaggagaatcacttgaacccaggaggaggaggtcacagtgagctgggcaacagaatgagactctctctcaaagaaaaaaaaaaaaaatttggagagatagggtcttcctatgttgcccaggctggtcttgaactcttggccttgagtgatcctcctgcctcagcctcccaaagtgctgggattacaagtgtaagccaccacaccagaactcaaccccattttttttagacaggttctcgctctgtcacccaggctggagtacaacggcacaaccttggctcactgcaacctccgcctcctgggttcaagcaattctcatgcctcaacctcccaagaagctgtgactacaggcgggagccaccataccagtctaatttttgtatttttagtagagacagcatatcactatgttggccaggctggtctcaaactcccgacctcagatgatccgcccgcctcagcctctcaaggtgctgggattacaggcatgagctgccatgtccagctctcaaccactttttaaattttttccttctgttgatgaatttgtgcaacttaaaaaaaattttcaggccaggcatagtggcttacacctataatcccagcactttgggaggccgaggcaggtggatcacctgaggtcaggagtttgagagcagcctggccaatatggtgaaaccccgtctctactaaagatggaaaaattagtcaggcatgatgtcgcacatctgtaatcccagctactcgggaggctgagccaggagaattgtttgaacccaggaggcagaggttgcagtgagccgagatcgcaccactgcactccagcctgggcgacacagcaagattctgtctcaaaaaaagaaaaaatattcaaaatgagtattatatccatgtggcaacaaaatgaaggatcacaaaagaagatagagtgaaaacgaagtgtcttttcctctccttccaaagagacagtcattttacccatttcttatgtatccttttagcagtattccaggcacatacatatatgcatagatggcaccttttttacacacgtgtttatgtggtaagtattgattgaaagcctgctgtatgccagacactactttaggtgatgggggtacagccgggaacaaaacaaagtttccagctttcctgtttctaatagaaagagaaagtgctacacagataaacagatgtacatgtcaagctgcactcgtgctgtggaggggagtaagcacagcaaagggacacaggggaaaggtcaggaaaggcttctctgataaggtaacacgtgaacaaagcaaggacagccagggcaagagtgttccaggtgccggagaaacagcaaggaggtcctggggttggggtggagcacgggggcagcagatgttagcaaaccgcacacaccgcgcctcgctccctctccatgaacagtcttggcctttgttccacatcagcctaaaatgagctgcctcgttcttttttagaggcagccaagtagtccaccatatggaggtagtacaatttgcttaactagttgtagagtttttcttttcctttttttttttaaggtatgaagtgaaaatcaggaagcggttggagtgagttctcaaaggaggaagagggaagcacagacctgctcttcacagttgcaaagcctggggcaagagcaggcacagcggcccacgcaccttatgtctaaatattaaaagttatgacaaactgttaagtgaaatatgcactgttctcctaccttgacgaatatactttcgtaacaacctggaaggtcagatttaaatttcgaatttcagattcttcagggttctgcagcctgccccaggcctgcacctcctcttcctacttccagctccagcactgagaaggtcccgtgagcacttgggtgtggacgcctgagcctgccctgtgcagtttccatccatgctgcccttgggcctaagggtgctccggaggaaagacccaggaaagaggcccacataggccctacaagcaggctgaggctatttgggcaagaaactccgaggtcccaggtactcggattgtgggctagaaggaaggaggggggataggctctacgtgggtgagacccctcgattccacgtgattcccatctctcagggagagatacagctggagtggagacagcaggatccgatggagcacgggacagagggaagggactcctcttgcccacatcgaaggctggtgctgcagaagtgtggacactgcttgtctgccttggggaagacactcacagtgtgggcaggacagagtggaaagctggaatcagcagccgggccagctggagggacccaggctgagcacacagcaggaaagccatgaaccgtaagccctgcccagggcttgcccacatcagtgccaaccaaaggggaaaacctggtccttcttgggaaagaaacttccactctggagaatgttcgaagagctcataacaataatagtctctgaaaccacaaagacaaagtataaacaaggaagccgacaccaacagtgaagatgccaccatctcgctggttggtcaacaaatatcattgtaaagtctaccactctcttgcaggattcgtggaactgggaacatgcgttctggccacatttggtgactgactagcattgtgaggttgagcaattcacttacatcattgtaaagtctaccgctctcttgcaggatatgtggaactaggaacatgggttccaacccatttggtgactgactagcattgtgaggttgagcgattcacttacatctctgtgtatcagtttcctcatctatccaacaggagtatacttgcccaatctctttcagagttacgagaatcggttccattccccttgctttgctcatttagccactcacaaaacgtcagctctgtgccaagagctgggcaggtctgcaagagcagaaataaagacatcgtactttctcatactttctgacctcaaggaacttggtccgactgaggagacaaacagctgtgctccaagagctgcccattccttgtgctgttgcaggcttagaagcattttccagataaataaatcgaagttaagatagaatgaggccgggcacagtggctctcgcctgtaatcccagcacttttgggaagccaaggcaggcagatcacttgaggccaggagttcaagaccagcctggccaacatggtgaaatcctgtctctactgaaaatacaaaaattagctgggcgtggtggcgcacgcctgtagtcccagctactcaggaggctgaagcaggagaatcgcttgaacctgggaggaagaggttacagtgagccaagactgcgccactgcactccagcctgggcaacagagtgagactctgcctcaaaaaaaaaagaaaacaaaaatgttaagatagagagttgttcttttaaagtaaagggggaagcattttatttctgtgctaaattatggttttcaaaaaggtcaaatcatgcctttgatgtaaaattttattcaacactttgacgaagaaaccaataagatgttaaaactggttcaaataatttgaaggaaagaaatgtatatattatacacaaacatatatagtatctataaacatatatataccatataaacatctattgtatatataaacatattatttttatacattttatataggtatataatatgtattatgtgtgtctttatatataaacataaacaggccaggcgcggtggctcaagcctgtaatcccagcactttgggaggccgagacgggaggatcacgaggtcaggagatcgagaccatcctggctaacatgatgaaaccccgtgtccactaaaaatacaaaaaaaaattagctgggcgtggtggtgggcacctgtagtcccagctactcgggaggctgaggcaggagaatggcgtgaacccgggaggcggagcttgcagtgagccgagatcgcgccactgcactccagcctgggcaaaagagcgagactccgtctcaaaaaaaaaaaaaaaaaaaaacataaacatacacccacccacacaaacacagttgacctttgaccaacatggaggttagggctgccaatccccgtgccatcaaaaatccgtgtgtaacttctgactcccccaaaacataagtaacaatagcctactattaaccagaagccttaccaatggcataaacagtcgatgaacatgttttttgtatatgtatcatatacagtaaagtaaataaaatgttattaagaaaatcagagagaaaacacattgacagtgctgtactgacactgattactgtaagtttatatcatctgtctacaagatgaatggtctgtctgaaacggcaggccgccgcagctgcagacctcaatctatggtacatatcaggcaatccagctttttcttgtaatgtcaggactttcctttgctttttgggagcacttccagcatcatccgtagcagttcatctgggtcctacggtgttgctataaggcttagggcattgcactaaacacagtgaaagacgctggagaactccaatcgatcactttttcctgctgttcacaacttactggagaggtaagctgctcatgtggagataattagcgggtttgttcatgtttgtttttgtttttgttttgagacagagtcttgctccatcgcccaggctggagtgcagtggcacagtcatggctcgctgcagcctccaactcctgggctcaactgatcctctccttcagcctcctgagtagctgggactacaggcaggcgccaccatgcctgggtaattttttaatttttcttttgtagaaaaaatttctggtttcaaactcccaacctcaagtgatcctccttcctcgggctcctaaagcactgggattataggcatgagccaccgcctagataatttactttgtcacatgacattttaaggggatatttgcaacacttgggctgattaaaataacaacaggagatggctacaaaattatcacagtagggcagtatgtgttacagtgaaatttatacagttacaatttaacactgcatctttaaattatcacagtagtgcaatattacggtgaactttacacagttacaatttaacactgcgtctttaaattatcacggtaatgcggtatgtgttacagtgaactttatacagttacgatttaacactgcatctttaaattatcacagcaatgcggtatgtgttacagtgaactttatacagttacgatttaacactgcgtcttttaattatcacggtaatgcggtatgtgttacagtgaactttatacagatacgatttaacactgcatctttaaattatcacggtaatgcggtatgtgttacagtgaactttatacagttacgatttaacactgcatctttaaattatcacggtaatgcggtatgtgttacaattaactttatacagttacgatttaacactgcatctttaagttatcacagtaatgtggtatgtgttacagtgaagtttatacagttatgatttaacactgcatctttaaattaccacagtaatgcggtatgtgttacaattaactttatacagttacgatttaacactgcatctttaaattatcacagtaatgtggtatgtgttacagtgaagtttatacagttatgatttaacactgcatctttaaattatcacagtaatgtggtatgtgttacagtgaagtttatacagttacgatttaacactgcatctttaaattatcacagtaatgcggtatgtgttacagttaactttatacagttacgatttaacactgcgtctttaaattatcacggtaatgcggtatgtgttacaattaactttacacagttacgatttaacactgcatctttaagttatcacggtaatgcggtatgtgttacaattaactttatacagttatgatttaacactgcatctttaaattatcacagtagtgcagcacgtgttacagttatctttttttttttgtttttgagatggagttttgttcttgttgcccaggctggagtgcaatggcgcaacctcagctcactgcaacctctgcctcccaggttcaagcaattctcctgcctcagccttccgagtagctgggattacaggtgcctgccaacatgcccagccaattttttttgtatttttagtagagagcaggtttcaccaaattggccaggctggtctggaactcctgacctcaggtgatccacctgccttggccccccaaagtgctgggattacaagcatgagccaccacgcccggctacagtgaactttatacagttacaatttaacactgcatctttaaattatcacagtagtccaagatgtgttgcagtgaactttatacagttatatttaatactgcatctttaaatttgtttatgtttctcttgactgcaggcatggtctgtaaatgtgtgggtaagttttgatacattttaactttttaaagtagatgtatgtatattttatggtggtaaatgattttaaaaaactagtattgggctaggtgcagtggttcatgcctataatcctagtgctttgggaggccaaggcaggaggattgcttcaggcctggtgttcaagaccagcctgagaaacatagcaagactctgtctcttgtagagaaaattttctagaattttccttgataggaactattcttgacagctcctggtgcccatgtcgtgggggcaccgttcattcttttgctgatatttgacatcccacatatgactatatcgctgagttctttccctttgttttttctttttttgagatggagtctcaacatagtgagaccctgtctctacaaaaataaaataaaataaaagatgtaaaaattagccaggtgtggtggcctgcaactgtagtcccagctacctgggaggctgaagcaggaggacagcttgaccttaggagttggaggctgcagtgagtgattgtttcattgcactctagcctgggcaacagagcaagaccctatctcttaaaataatacactagtgctacatatattttatgcgttcatgacctacctttttcttccttttttcaatatttccaggctaagcagttcatcttctagttttttcaaattgttacaaatctccaaaaaattttccaatatatgtattgaaaaaaatccacatgtaagtgaacccacacagttcaaacccatgttgttcaaggccaaatatattagagaaatgctgaaatgaagttgctaataaatgcaaagtggttaacacccataatatcctacagtacaataaaatgtaatgttttgagattatcttttctccaggatagaattgtatctttgccagacaaaattgtatctttgccagacaaaattcatttgtattcttgtaggtaagaatcacttgcattactgtaagtttttttacagcttagcttttatccctatggagttgtaaaatagcctagttattagaaaggtaagtcaaggtgcaccccatagaatcataatccccaagagttaggagggcaacacctggcattccacagaaaggacacccagcattctcttttgcccatttccaaatcttgaacgacattgcccctgattgtattggtaaccttctttttttttttttttttttttttttttgagacagggtctcactctgtcacccaggctggagtacagtggtgcaatcattgcactccactacttgggaggctgaggcaggagaatcacttgaacccgggaggcggaggctgcagtgagccgacatggcgccactccactccagcctgggcctcaacgaaaaaaagatccaggtttttttctttctttatcttttccttaaacaagcatgaacccgctatccaaaccaagaagtcaaacataaccaaccgtctcatcgtcctgtgcacccctcccttccccgactccccaacccccaccaagaggtcaccactgtccctgccctacagtttacactttttgttgcactgtaaaatatcgttgtatcataaatacatttgtgttaaacagacgtcctttttttttcttttttagagatggagtctcgcactgtcacccagcctggagtgcagtggcacagtctccgctcactgcaacctccccctcctgggttcaagcaattctcctgcctcagcctcccgagcagctgattataggcatacgctgccatgcccggctaagtttttgtattttagtagaaatggggtttcaccatgttgcccaggctggcctcgaactcctgagctcaggcaatccatctgcctcgacctcccaaagtgctaggattacaggcgtgagccaccgtgcctggcccctttttttaatttaatattgtttccaaggttcatccgtgttgtgggggcatagatcatccttttgctgatgtataatattccatgtgtgactatatcactgagtggttccagctttttgctactatgagctatgctgatatgaacatttttgatggctcctggtgcccatatgcaagaatttcacttggatgtgtctttttttttctttcttaaacattcagttggtgccaagcttgggtatatcttaaggactggggttctcagagatcctgccgtcctcaggacactggctctgccttccaattagctcctgtcactgtagcgagatgtttgccacagacccaggcaacacatccatggccgaccgtgcccagcagcagaagaggagcgtgtctcctcctccctttgatgaaggagcaaacctttccctggagcctcaggtagatgatcttgaactctaattggccaggagtgggtaacaggttatttctcaaacatattactgacaaagagaatgggatgaccataatgactccagccaatcaggattctcttgtgaagatacggggcggctgtaggtgggcacagggaccagaacaagatcagagctctgcaggaagggggcaaaggttgggtgggcaattgcagctgacaatgtcttctccacctccatcccccgccattcccctctacctgcagaaagcttcttccagacacctgtgactctgcctgaggcttttctccacttgcatttttggcccacgcagaagaagccagaagtgctacagagttagtgcctctagaagccacgttttctgagaggtggtggataatacccagcttctgagaggtggtggataatacccagcttctgagaggtgatacccagcttctgaggggcggtgggtgacacccagcttctgagaggcggtgggtgacaccccgcttctgagaggtggtgggtgacaccccgcttctgagaggtggtgggtgatacccagcttctgagaggtggtggtcagcttctgagaggtggtgggtgatacccagcttctgagaggtggtgggtgatacccagctgctgagaggtggtggtcagcttctgagaggtggtgggtgacacccagcttctgagaagcttcgttgcccctcacttgggatcactggcatgttttggcaccgcctcccagagtcctcccagaggactgagctgtggttgagcacagaggtagctggcaggataatgaaaactttattaactgtcctgccttccctgtctcacttgcccactcctccacccgtgtttcctaagaccctctcgcagataaactctgcactcaattcctagtcttagagtttgcatttgggggaactcaaacaaacacaacaaccaacacagcagccaacagtccctgtgccagggatgtgtgagcaagatgggagactgggttggatgctggatagatgggctgttggctaaggatagaaaattagaagtcatcagcatgtaggacatgattgcagctgtgaatgtagatgagaataccttaatatacagacagagcttcaagaacagagtccttaggccaagctcggaaaacaccaacattcagaggcttctcgacattccctttagaagggaaggtttatgtgcaaaggaggcggaatggcctagaatcacgaggatggtgtcccaaaagccgggcagatacaacatttcaagaaggaaagagtggtcaggagtgtcaaatgttgctggcaggtcagggacaacaaggacaaaggttgtccactggattcgatgactcggaaggacactggtgacgctcgatggctcggaaggacactggtgacgctcgatgactcggaaggacactggtgacgctcgatggctcggaaggacactggtgacgctcgatggctcggaaggacactggtgacgctcgatggctcggaaggacactggtgacgctcgatggctcggaaggacagtggtgacgctcgatggctcggaaggacactggtgacgctcgatggctcggaaggacactggtgacgctcgatggctcggaaggacagtggtgacgctcgatggctcggaaggacagtggtgacgctcgatggctcggaaggacagtggtgacgctcgatggctcggaaggacagtggtgacgctcgatggctcggaaggacactggtgacgctcgatggctcggaaggacactggtgacgctcgatggctcggaaggacactggtgacgctcgatggctcggaaggacagtggtgacgctcgatggctcggaaggacagtggtgacgctcgatggctcggaaggacagtggtgacgctcgatggctcggaaggacactggtgacgctcgatggctcggaaggacagtggtgacgctcgatggctcggaaggacagtggtgacgctcgatggctcggaaggacagtggtgacgctcgatggctcggaaggacactggtgacgctcgatggctcggaaggacagtggtgacgctcgatggctcggaaggacagtggtgacgctcgatggctcggaaggacagtggtgacgctcgatggctcggaaggacactggtgacgctcgatggctcggaaggacagtggtgacgctcgatggctcggaaggacagtggtgacgctcgatggctcggaaggacagtggtgacgctcgatggctcggaaggacactggtgacgctcgatggctcggaaggacagtggtgacgctcgatggctcggaaggacagtggtgacgctcgatggctcggaaggacagtggtgacgctcgatggctcggaaggacagtggtgacgctcgatggctcggaaggacagtggtgacgctcgatggctcggaaggacagtggtgacgctcgatggctcggaaggacagtggtgacgctcgatggctcggaaggacactggtgacgctcgatggctcggaaggacagtggtgacgctcgatggctcggaaggacagtggtgacgctcgatggctcggaaggacagtggtgacgctcgatggctcggaaggacactggtgacgctcgatggctcggaaggacactggtgacgctcgatggctcggaaggacactggtgacgctcgatggctcggaaggacagtggtgacgctcgatggctcggaaggacagtggtgacgctcgatggctcggaaggacactggtgacgctcgatggctcggaaggacagtggtgacgctcgatggctcggaaggacagtggtgacgctcgatggctcggaaggacagtggtgacgctcgatggctcggaaggacagtggtgacgctcgatgactcggaaggacactggtgacgctcgatggctcggaaggacactggtgacgctcgatggctcggaaggacagtggtgacgctcgatgacttggaaggacagtggtgacgttcgatggcttggaaggacagtggtgacgttcgatggcttggaaggacagtggtgacgttgtaaagcggctttgatggcacgatggtgccagaactacaactgtagtgggctgagaagggatgggtcagtgaggagacagagactgcaaaggagaccaaatggaatgatgcacaattaaaatacctgtaaacatttagattagctttccttgcatggcctttttatgattatttatgaaacgcattcataaaatgcatccctttgcttgaggtgacttttctctttcatagctcactggctggctcaacataacctcgacacaaccttcactaaaatcagaagagaaatgatcaaactgtctcctgccaagtaagcattgaggcaagaaggaccagctgagagggaagacgggcaggagggcagccagcctttccaagcacctgtctgcaagtaccagggtgagcatgaaagggcatctgaaatgcaaaccccagagagaccgatggtagctgatcatttccacgaaggccttctgccatttgtatttcacttagcttctaaggacaaaagcagacaggcaagaggcagataccgcacactctgcatgccgagctgtgctggacacatcagggagcttgccaggggatgggaagaccgaggacacacgtcctactaacagaagggccccttatagagcaatgcgtccgcacacaccaatgactgtcatttactcagtactgacagatttatagatttgatgcaatccccatcaaaatctcaaaggggattttaagaagtaaaccagaagatttgaaaatgtatatggaaaagcaacggctctagaatcgtccaaacaatcttcaaaaataacacagttggaagacttacactacgtgacatcaagatttaccatgggccgggcacggcggctcacgcctgtaaccccagcattttggaaggcaaaggcgggaggacaacgtgagctcaggagtttgagaccagcctggggaacatactgataatccatctctattttttatttgtatttttttaaaaaaaagatttaccataaagatacaagatgataagtcaagatgatgtggtattgatcaaaggatagacagaacaacagaacaaaacagagtccagaaatagattgacaaacacatagttaactcattttctacaaaaataccaagtcaggctgggtatggtggctcatgcctgtaatcccaatgctttgggaggccaaggtaggaggatcacttgagcccagagatttgagacccgcttgggcaaaacagtgagaccctgtctcaaaaaaagaaaagaaaagaaaagaaaatcagaaatgaccagctgtggtgactcacgcctgtaatcccagcactttgggaggctgaggcaggtggatcacttgaggtcaggagtttgagaccagcctggccaaaatggtgaagccccatctctactaaaaatacaaaaaaaaaaaaaattagccaggtatggtggcacgcacctgtagtgccagctactcaggaggctgaggcagaagaaccacttgaacctgggaagtggaggttgcagtgagccgagatcgtaccactgcactccagcctgggccacagagtgaaactccatcccaaaaaaatttttaaaaatcgtaatgaaaagtaccaagtcaagtcaatgggaaaaggaatgtcttttcaatggaagttcctggaaaaactggaaatcgatttgggaaaaaataaatgtgactcctatatgtgactttattcacaaaatcaatttgaggtaggccaggtgcggtggctcacacctataatcccagcactctgggaggccgaggcgggcggatcacttgaggtcaggagttcaagcccagcctggccaacgtggtaaaaccctgcctctactaaaaatacaaaattagcctggcatgtttgtgcatgcctgtaatcccagctacttgggggctgaggcaggagaattgcttaaatccgggaggcagaggttgcagtgagctgagatcacgccactgcactccagcctgggcgacaagagcgaaactccatctcaaaaaataataataaatttgaagtagatcatgaacctaacctaaaaccagaactataaagcttctagaagatagcatagcacactgtctttgcaatatggggcaggcaaagcatccttggacacaatacaaaaagaaaaaactgatcaaatgaattgaaaattgaaaaaaattatttatcagaatttcaaatttctgcttatccaaagacaccacattcagaaaatggataagttacagacctggaaaaaaaatctttgcagtcataaagctgacaaaacacttatattcaagttgtgcaaagacatcaacaacaaacaacaaatcaacaataaacaaccacattacagaatggccaaaagacttcaaaagacacttaaagatatacaaatgacaggccgggcgcagtggctcacacctgtaaactcagcactttgggaggccgaggcgggtggatcacctgaggtcaggaatttgagagcagcctggccaatatggtgaaaccccgtctctactaaaaatacaaaaattagccaggtgtggtggtgcatgcctgtaatcccaactactcaggaggctgagggaggagaattgcttgaacccagaaggcagaggctgcatcgagtggagattgtgccactgcatggaagcccagaccacacagcaagactccatctcaaaaaaaaaaaatatatatatatatatacatatatatatatatatacacaaatgaccagaaagcactttcaagagttcttgacttcgttaatcaccaagggaattcaattcaaaaccacagagaaatacaacttcttacccactagagtggctaaaatcaaaggctgatttttcaatgggtaatggggactactagagggaggaggggctggaagatgtggactgagaaactactgttgggtgttgtactcaccacctgggtgacgggatcacccataccccaaacctcaatgtactcatgtacattgtactcatgagtcatgtaccatcactcagtgtactcatgtaacaaacttgcacatgtaccccccgaatctaaaataaaagttgaaattaaataaaagataaaataccattccatatctttttaaaaagacacatttggttatctactgttgcataacacatcactccaaaccttcgtaacttaaataactacaaccattgtattttctctcacagcttctttgggtcaggaattcaggaaaggcttgtctgcttggggctggcctggggtctctcctgctgctgctgcaggacgatagctggatgggaaaagtgggggctggaggagctgaggcatctttctctccatacatcttagaggctctccacgtggactaggtggggatttatcaaggtgtgacagccttggggtcctcagacttctcaatgggaggctcaggactctacagcaagcacgtcatgggctaagaagatggatggatgctgcattccctttaggacctagcctgagaagtcacacagaggcacttctgccacatactattggttacaagcgagtcaacaaaccccttaaattgaaggagagcggaatgagactctgcgtcttgccatgggaatggcaagattcttgaagagtatgtgggacaagagatattactgcagccagttttattttatcattttattttattttgagatggagtcttgctctgtcacccaggctggagcacagcagttttattttattttatcattttattttattttgagatggagccttgccctgtcacccaggctggagtgcagtgatgcaatttcagctcactgcaacctctacctcctgggttcaagtgattctcctgcctcagcctctcaaatagctgggattacatgcacccaccaccatgcccagctaatttttgtatttttagtagagacggggtttctccatgttggccaggctggtctcaaactcctgacctcaagtgatccacccacctcggcctcccaaagtgctgggattacaggcgtgagccaccatgcccagcctctgcagccattttcagataatacaatctgtggagggtaaacctagaaagaaaagcaggtgatgcatcataccaggccttgtaagccacactttgttatttttttttttaagacacagaggccgggcgtggtggctcaagcctgtagtcccagcactttgggaggccgaggtaggcggatcacaaggtcaggtgttcgagaccagcctggccaatatggtgacaccccgtctctactaaaaatacaaaaaataaaaaataaaaaatcagccaggcgtggtggcacgcacctgtagtcctagctactagggaggctgaggcagaagaatcacttgaacctgagaggcagaggttgcagtgagtcacgttcacgccactgcattccagcctgggcaacagaggaaggctctgtctcccaaaaaaaaaaaaagagagagaaagtcttgctttgttacccaggctggacagcagtggtgcgatctcggctcactgcaggctcaagttcctccacaagtgcccctcagcgcagctggttaattttttgtagagatggggtctcactacgttgcccagaatgggctcaagcgatccacccaccttgacctcccaaagtgttgggactacgggtgtcagccctgcacagagccccacaagagtttagatcttgatgtaaattgtgatgaggaagcaatggaggactttttggctttttatgttttgtttttcatcactggagacttttagcaagagagtgaacggtttggttgtttttaaaagtttgttctagcagctgtgcggaaaaagagttcgtggggaaggtttgaaagcagagaccattcaggagaggacccagaagtcccagtgccagacacggcagtcggccccagcctgggtaagggacaagggagagggtaggggacacggaagcccaccaggtttccagccagtccagcggttttgttcactaaagtggaaaaccatgaagaagtaagtttgttttggacacattggctttgagagtccagggtagatgtacgaggctgaaactcaggcaataaaaattgaggggagaatacacagcatttaaaaaggtacaggaggccgagcacggaggctcatgcctgtgatcccagcgatctaggaggccgaggcgggaagatcgatggagcccaggagttcgagaccagcctgaaaccaaaaatcaaaactcttagccaggcgtggggatgggaggccaaggcaggaggatcgaggcacgggactggacgagatgagtgtcagcccagggatttaaaatctctctgcccaccctccccttcctgcggtcaactgtccagattccaacagacaaaagcaagcatgggcgaaccaccgtgcgccgcggtccccgacagaagcacgcatgcgcacacctctgtgtgcggaggtttccgacagacgcacgcatgcgcacacttctatgcgcggaggtctccgcagacagaagcacgcatgcgcacatcgctgtgccggtatcgccaacagatggaagcacgcatgcgcgcaccgctgcgtacctagcactccgacagatgtacgcatgcgcacaacgctctgttctcgagatccccgacagaagcacacatgcgcacaccgctgtgtgccaaggtcgccaaaagacggaagcacgcatgcgcacaccgcggtccgtggggcaccgggcggaagcgtcctgactgcgcaggcgcagcaggggtggtcgccatggagacgcgtggccctggcctggcggtccgcgctgagagtcgccgattagtcggcatcgggcctcgggcgcccccggggcgggttgggttgcagcccagcgggcggctggaccgccgcggtggggcggggacaatggggtacaaggacaacgacggcgaggaggaggagcgggagggcggcgccgcgggcccgcgggggtctagactgccccccatcacaggcggcgcctccgagctggccaaacggaaggtgaagaagaaaaaaaggaagaagaagaccaaggggtctggcaagggggacggtaagaggagcagctagcccggctgcgtcagctccggttccctggagactctttggggacccaccccccatttacccttcagaccggaaacagaagctcagtggtcccggaccgaggtcctcctgctccccacacatgcccgtcagcagcacgttgatgccccagccccacccgtggagaccatccaccaactctgcggtcccttagccccacacagagacccctacagatatccaccattcctaagagccttccagccccacacaaagacaccctctcaacttcctaatccctcagccaaaactggcagtcttaaacgtctgcgccttccccacagaggccctcctcacaagacactttccccaccccaaacacattgatgccacatgaaaggccctcactctcatgcacagagaagggcagactcctgcctcccctcctcccaccctcttgcgttaaggctgcctgcctgtggatgcgcggtagacacccacacccacagacgtgtgtattaaaggtcctcgctgcatgggctccccctcgcacccaccaaggggcagccttggactgcacaaaccccatgacaccagtcactgtgacatcctcctataatccctgacaccctcaaccactccccgcttcatatcagtgtaacacccacagtgaaactaaagggcgggggacaccctcaaccactccccccaccttctatcaatgtaacaccaacagtgaaactaaagggcgggacgcagtggctcacacctgtaatccgagcactttgggaggccgaggtgggaggatcacttgaacccaggacttccaggctgcagtgagctatgatcgcaccattgcactccagcctgggcaacaagcaagaccctgtctctcaaaaaaacaaacaagaaaactaaagcacagatccccctcatgcacacacattcctagtctacacacacagactgttaatacgttatccattcgcgtgtgtagtcatatgcaggcaggaattgcagtctctctcagggacaccttcacaaacacacataccctacctgccataaaccccagtccctacatctcaccaagctcttcttgtagaacccctacatttcttgacaaggggactgagcacccactttgaggagagagagcacagcagtgacagagaatgcaggtgcccgtgagtgctgtgaggccactgtcgcccgtgtggtccacctcagtggctttggctgtctgggagagggctctaagctccagttctggggcctggccctctgtggcagagctggcaccaaggcaagcaggaggcagagtggcagcctcgcccatatggaccgtgcagtgtgggaagggagcaatgggaagatgataagtacttctcaggcgtaatacaaaggcaagaaaattctgcagttcaggtcaagaagccctgtgtggctgggcacatggctcacgcctgtaatcccagcactttgggaattcaagaccagcctggccaacatggtgaaaccccgtctctactgaaaatacaaaaattagctgggcatggtggcaggcacctagaattgcttgaacctgagaggcggaggttgcagtgagccaagattgtgccactgtgctccagcctgggtggcagagtgagactcagtctcaaaaaaaaaaaaagccctgtgtgtatctgcaaaaagaaatttggcagttcattgtccttttggcgtagcttttcactgtagaaattacagtgacatgtgcctcataccatcagcagggggcaccagatagtttccagggcgtagcaagggagggaaatgtcaaaagatgatttctttctctctcccctaaaataaaaggacgagctgatgaaagaaccacaatttgtagcattttatgtgcatgttaaataattctgaagtgctattgatgttaaaaaaaaaaatcagtacaagccatacagcagaagtatttctggcttggcataatactgctttcagtcaaatttaggaagcttttctgttgttttccgttccttccatcataaagtgtctagactagggtagagtcacagactcccagaactgggaatggccgtggtgagcacatggcgaggatggatgagggcagcacggcccagtggaaagaatggggcattgggggcccagcctgcactcaggtcccagctctgccactcgctcatgacattggcaagttcctgaaccttttggagcttcggtttcctcacccgaagaatagggccgatcgcctttacccagacggcctggctcagactgtgtgctcaatgaatggttcctcctgccctgaaatgatttcagcaaaatcacacaggcaggtgggcacgaggctggtgggcttggcagcctgagccctgggtacggaggggcccccatcctcctcttccatcttgggtgattttggcaccatccccagcaggccaaggtcagacattgccacaaacactaacctgctcatctactcagcagataaacatcagagtcagagcctgaagagccagccgctttcttcctcctttcatgacatcttaagtccttgcaaagagcgtggcccgaaaccagagcacagacagagcaaagtggaaaagaagcacctcccttctgactcctccaccgtcagcctccccgactttgccgaaatagagaaccttgcgaatcggatcaacgaaagtctgcgttgggatggaattcttgctgacccggaggcagagaaggaaaggattcgcatctataaactgaatcggagaaaacggtaccggtgcttggccctcaagggcttccaccccgaccccgaggccctcaagggcttccaccccgaccccgacgccctcaagggcttccaccccgaccccgaggccctcaagggcttccaccccgaccccgaggccctcaagggcatccaccccgaccccgaggctctcaagggcttccaccccgaccccgaggccctcaagggcttccaccccgaccctgaggccctcaagggtttccacactgaccccgaggccctcaagggtttccacattgaccccgaggccctcaagggcttccaccccgaccccaaggccctcaagggcttccaccccgaccccaaggccctcaagggtttccacactgaccccgaggccctcaagggcttccaccccgaccccaaggccctcaagggcttccaccccgaccccgaggccctcaagggcttccaccccgaccccgaggccctcaagggcttccaccccgaccccgaggccctcaagggcttccacactgaccccaatgccgaggaggcccctgagaacttaccctacctctcggacaaagatggcagctccagccacaggcagcccacgtcgaaagccgagtgccccaatctctgttttgaaggaaaccttaccccaaagcttctacactctgacttagctcctactctgctggagtgaaaatctacccacgacgctcacaaacttataattcctcctcaccacaagtttatgtgttaaaaaccatcatcataaaaggaaatgagacccgtatctgaaggaaacagatgttcggtacacggacgacgccgactctcccatcaccaagctgccctcggttgcccaggagagccacagtgccttgagaacataagcaatttagtgaacagagttcttttcagaatttcctttttcttaagtaagcatctctgttacttaatttctcaccacagctagatgtctataatctgccccaaaaagaaaagaaagcgtgtagatgatttacctcttaagtctcaatctcatggtgaaactcctcacacggtacctgcttctgttggccggaggacgatgccctgaacctcttggagcctttttctgttttaattaaatgcatggcctgcctttatatggcctcaaataagtgggttccagaactccatccctgggaagttaccatgggaagtcccaagaggaatactgcttctttcataaacatggtcctctcctaatcctccattataaaaagcctcgctacgccgcgtctcctaaatacacattcctcccctccacaagtagccagtgagtgagggccacgtgctgtcgtcgtttgtgctctcccagaagcagcccctgagacgagggttcaaatgcaagtagattatctgggaggtgaagaaaggatgagtagagggtgatacagagaagggaagacggccaatcctgggacttttctttttagacaggatcccgctctgttgcccaggctggagtaccagtggcgaaatcatagctctcactgcactccacctcgtgggctcagatgatcctcccgcctcagccccctaagtagcagggactataggtgagtgccaccacgcctggctaattttaaaaattttttgtagagattggagggggtgtggtctcactatgttgcccaggctggtctcgaactcctggcctcaagcagtcctcccaccttggccttccacaacattacaggcatatgagccactgtgtctggccccccttccagggactattaggccagctttcatactgggcttaattccacagggaaacccacttctagaattatcccacctgggggtgaggaagctggggtatttatactccccaaaggcattggccgagggctggtcgtgtgtgtgtgtgtgtgtgtgtgtgtgtgtgtgtgtgtgtcctggcatttctagctgaaaggttgtgtgtgtgtgtgtgtgtgtgtgtgtgtgtgtcctggcatttctagctgaaaggtgtgtgtgtgtgtgtgtgtgtgtgtgtgtgtgtgtgtgtctctcctggcatttctagctgaaaggtccaaaggaaaagggtggtctctggggaagcctcagctacctcagcaacaccgtgggtctgagagggacagcatggagggctaagatgagattcctgaccttcaagaggttacagtgttctggggtagacaaaaaatgaatgtacactgtacacaggagaggttaaagccgatacagacatcacagaatgctcatttgaaagttaagtgaaaatggctgggcgcagtggctcaggcctattatcccaacactgggaggctggggcaggtggatcatctgaggtcgggcattcgagaccagcctggctaatatggtgaaaccctgtctctggtaaaagtacagaattaaccaggtatggttgcaggtgcctgtagtcccagctcctcaggaggccgaggcaggagaatcgcttgaacccaggaggcggaggtggcagagccaagatggtgccactgcactccaccctgggcaacagagcaagactctgtccgaaaaaagaaaaaaaagttaagtgggcatcgtggtccctgctagctctgggctggcagagcagccctcttctgacccttccttaaaaggccagttacagtttccacatttgcccttgcaccctgtcaaaatatactgaagagacatttggaagagtcctctcctgccatggagaatggttagcagacaggaacgggcctccctgtgctgaggccaggcctgtcctctgctctccatggagaggaaggggcaggaaatactccagtgccagccacaggacctcgcttgtgccccagggtattaaaggcagagacagaacagagggcagccacggggctggcatctcatgtgccctccgggtctaccacagtggctggagcctggggcacagaggagtgtgagggtgcactgggctgagacggtcgcttagcagcgccttccatggcggtgagaggcaggggtgggggctgtggtcatctcccagctgcgaggtaacattctgggaaagtagctaagatggcgagctttgacaccagagctgaattcacctctttcccaccacatgctagcactgtggcccctggcagattgcttcacctctccgagccttagttacctcatctgaaaaccggactgcaaattcctgccttagtgctgtgagaatcgagtgcaatgaggcatctagcatggcgcctggcacccaggaaacaaactacgagttttcatcagtggtatttcaggttgacgtggccacatgtctgctagagagactgtcccgagtaatggtgtagaccttacctcctggaagggtcagcttcacaaacgaaatctggcttcagtggctggccaagagagagaattcacacacagagaacaaatgacgggggccccggagcaggagagagtggagcaggaaggaagccggggccctgaaggccggtgcttaacgtataatgatagaaagcaggtggggtgaaggttcctggaacacacaagtagcttcaactcagaacaccttgggttcgaagtttgcatatcttcctcacacccaggctgtagcagtgaggactccttcagggcaagaaacaaaccacagtgaaaaccaccttacagaccaaggggaatggttgactttttttttctttttcttttttttttttttttgagatggagtttcactctcgtcacccaggctggagtgcaaagcaccatcttggctcaccacaacctccgccttctgggttcaagcgattctcctgcctcagcctcctgagtagctgggattacaggcatgtgccaccacgcccggctaatttttgtagttttagtagagatggggtttcaccatgttggccaggctggtctagaactcctgacctcaagtgatccactcgcctcggactcccaaagtgctgggatttacaggcgtgagctaccacgcctggccggaatggttgacttataaagccaacagtccagggttgcctgtggcttcagtcatggctggatccaggaggtcacactgtgtcatcaaaatgtctctctctgcgtatttcacctctgcctcctccatatcagctttatgttcaggcaggttctcatcacaggatgacaaagacagccactgatatccttataattttgtaaggaaaagagagttactcctctgtccgtatccagtgtccgtatcaatcccaagaaggtctctggcctggcaggggtcatatgtccatcagtggactaatcgtagcagccaggcgaatacagtgtttgatggctacagagacctagaacgtggagcagggcagggcagcccaacaggatgcagtgtttgatggctacagagacctagaacgtggagcggggcaggacatcccagcagccaggtgaatgcagtgtttgatggctacagagacctagaacgtggagcggggcagggcagcccaacaggacgcatgaactaaacagattgttacagaatctatccagaatctggctgggcgcagtggttcatgcctgtaatcccagcactttgggaggccaaggcaggaggatcacttaaggtcaggagtttgaaaccagcctggccaacatgatgaaaccctgtctgtactgataatacaaaaattaaccagcgtggtggcacgcacctgtagtcccagccacttgggaggctaaggtgggagaatcacttgaacctgggaggcagacgctgccgtgagctgagatcacgccacttgcactccagcctgggcaacaaagcgagattccagcaaaaaagaaaaaaaaaaagaaagggaaaggaagaaaaggaaggaaggaaggaaagaaagaaacggaaaggaagaaaaggaaggaaaggaaggaaggaaggaaaagaaagagaaagaaagaaagaaaaagaatgtatccagaatgtctctgtctctctctctcctctctttgagacagggtctggttctgtcacagaggctggagtgcagtggcatgatctaggcttaccgcaacctccaccccctaagctcaaacgatcctcccccttcagcttcctgagtagctgggactacaggcgcacaccactatgactggctaatttttgtattttttggtagagaggctagtctcaaactcctgagctcaagcgatcggcccgcctcagccttccaaagtgctgggattacaggcatgagccactgtgcccggccaatccagagtctgtgtagaatatagagtgattccctaagagacgataagtagaacaggtttgtccattgctttccaaatgaagaatgattccttttaattttcactttttaaatgttttataccccatccaatgacctatcaagaatgattcatttttggtgaggcgccgtggctcatgcctgtaatcccagcactctggaaggctgaggcaagtggattgctcaagtccaggagttaagagaccggcctaggtaacatagcaaaaccccatctctacaaaatatacaaaaattatcccaagtagtcccagctacttgggagcctgaggtaggaggatcgcttgagcctgggaggcagaggttgcagtgagccaagattgtgccactgcacaatcagcctgggtgacagagcaagaccctgtctcaaaaaaaagatatatatttttaaaagcctctgaccaagggtcatgggagtggctcatagggcttgagtccatctcaattgacctgaattgactacatgcttatctccaagactacagacccttggacattgctatggaatccataaagacaaacaatgctctgtaatcatgggcccgtgagttgttttggagcagagtgtggcaaccttcagcactgttcagtaataacatttggggttacgatttgcacctggttttggtgacacctgagtttccacctttaaagctagtcacgtagctagaatgtgcccacatgaccaactcagaataggagacccccagcatgagaagactctgggtttcctggcaccgagatgcttcgtacacacacaggtagtggtttgagactcaggaacaaggcgctcctgcgtgagcctcgtgaacatccaccatgggccccacaggaagacaagctcagggctgtggccgcctttatgcggttggcgtggtaaatggcccccaaggatctctgcctcctggtattcatgctcgtctcttgaatgcgggttgaacctgttggctctttctagtgaatagaatatggcaaaagtgatgggatgtcacttccaagaggaagttacaaaaagagactgtgttcaggaggaggaagagaagcaatgggtaggtggagacggggatatttagggcaatgagactattctgtatgagaccaagatgggagttacatgtcattatacagttgtccagacccttacaatgtacaccaagagtgaaccctcatgtaaactatggacttgagttaataataaggtacgaaggccgcgtgtggtggctcacgcctgtaatcccaacacttcgggaggctgaggcatgagaaccacttgagtctaggagttcaagaccagcctgggcaacatagtgagaccctgtctctacaaaaaataaaaaaattagctgtgcttggcaacatgtgcctggagtcccaattactcgggagcctgaggtgggaggatcatcagcctgcaggtcgaggctgcagtgagccgtgatcctgccactgcactccagcctgggcgacagagtgaaactctgtctcaaaaatacaaaaatagagtctatttattagcaagagacagagaaagagagagaaagagggaatgggggaggctctggtttccatgtgacacactttttacttttcgtcttttttttgagacacagtctcactctgttgcccagacgggagctcagtggcgcagtcacagctcactgcaggctcagcctctccaggctcaggtgatcctcccacctcagcctcctgagtagctgggaccacagacacacaccactacacctggctaagttttgtatttgttgtagagacacggtctcaccatattgcccaagctggtctcaaactcctgggctcaggcaatcctcctgcctccgcctcccaaattgctggaattacaggtgtgagtcaccacctttatctctttatctctctttatctctctctttctctcagggatcttgctctggggaaagccagctgcagtgttgtgtgggctgcctgaggaaaggtgccctccggaaagaaatgatgtctccgcccaacagcatggtggacctgagtcctgctaccagccacatgagtgtgcttggaagcaggtggagcccagttgagccttgaggtgcctccctctgtgagagaccccaagccggagacatccggccaagaggcacccagattcctgccccacagaaactgatacaataacgttgtttaaagccactacatttggaggtaatcttgttacacagcaataactgactaatacagtcggcctcttccatcagtcacgattctcagtgagttgtctcgcccttaatctgagggctggaaagcccgaaacccaacattgtcgtaagaaactgcgttacccaagacacccactgccaatgctcaggggcctctgcatgcatttccagaaacgatgctgtggcctacagggttgaggtcactgcggggggagttaagagccagataagactgaatgggcccctggccaggtgcagtggctcatgcccgtcatcccaacactttgggaagctgaggcgggcagatcacttgaggtcaagggttcgagaccagcctaaccaacagccaatatggtgaaaccccatctctactaaaaatacaaacttagccaggtgtagcagcgggcgcctgtaatccctgctacttggggggctgaggcaggagaatggcttgaacccaggaggtggaggttgcagtgagcggagatgacaccagtgcactctaccctgggtgatagagaaagattctgtctcaaaaaaaaaaaaaaaaaaacactgaatgggccccttcagcttcattatttttgtcaattttacgtcagtaaagctggtgggggaagaatgatggggcccacttgctatgctcataccaggagttgtgtgcagctatttgtattatgggttgtttttgtttgtttgtttttgaggtggagtctcactctgtcacccaggctggagggcaatggtgtgatctcggctcactgcaacctctgcctcctgggttcaagtgattcttgaacactggcctgtgttatattttcatgccgtgtgttctgtgtcttgcctgcacctttaattgtagctataatatcttatggcattttatagtttatatataacttcttctatctcatttgctccctttgcagtagaaattatttccattttacaactgaggcttagagaggaggtgattgctagaattacacaattcctaagagaattgctctaaggtctccaactgtcttttaggaaatctatatcaagcaactgctaaatattcagttctctgtgtgttgctgccagaatgatactaacagttcctgtttctgtggcatctcctctgcccaggcaggtgttggccattgaacatacatgactttgtttcagctcctcgacaatgtttgaggtgcaagatgctacagttcccatcacatccaaggaaatgggcacagactgggaaagtgacttgcccagggtcacaccaggagtaagaggagacgctgggatgtcacacccaggctagctggttccagagatcctgcttttaattactgcactgcagtatctaagacctcagcaggtgggagccaagccacaccccccaggggtcaacaacaatgggaggagatagatcaaggcagcaatgggaggagatagaccaatggggcttgtccgtggggtcagtggaatggaaggactggttttggaagagagaagggttcctgggaattgtggccagaaggggaggaggggcctggggaggtagaaacctctaccacccgggctcccgagggcccccattgtctcagacctcctggccacactgcgtgtttgtccatggtctaagctgggcctctgacaccactgacatcccctctgaccgtcactggacaggcatgtgcctccttccaccatcccagagccgtgcttccgggctcctctccgcagcctctgcctgcagctcctgcccacgccgtgccgttgaggaccggagcctaaggctgcactgcacaaaatgtggtcctgggaccagaagaaccaacatgacaggggcttgttagaaactctcttgttgggggtgcacagcggctcgtgcctgtagtcccagcacattggaaggctgaagtgggaggatgacttgaggccgtgagttagagagcagcatgggcaacagagccagaatctgtctctacaaaaaaaaagaaaaatagttggccctcccagccactcaggaggctaaagcaggaggatcaactgagcccaggagctcaaggttacagtgagctatggttacaccactgcactccagcctgggtgacagagcgagactctgtttctaaaaaataataaacattttggccagccaggtgtggtggcgcatgcctatagtcttagctacgtgggaagctgaggtgggaggatagcttgagcctgggaagttgaggctgcagtaagccaagatcacgccactgcactcctgcctgggcaacagagcaagactccctcaaaaaaattaacaaaatgttttaaaaagaaactcccttgctagtggattctcaggtcctccctgcaaaccagacctacggtatcagaaaagtcccaggtagctccctgcacattcaccgtgagaggctctggttgtcgggacacaattccccgtatggaattctcactctacttatgtttctccccgtcaccactggctacctttgattcagactctctttcataggatgaatagccttggaagatagagatcgtgtctccctccagagcaaagggcagattagcttcaatgatgacagaagatctcggttcccgggctcagagctccgctgctgtaacgtaagcccttctgtcctcatgtcacctagagcctcttcctgtcaccctgtgggaagtgattctgaggaaaccaggacaattgcaaacactctggctactgctttgctgtgactaataaacatcctttgtcttgtctctggccccagagtctcctgtctttagctcacatccatgaaattgtggcgggcggccaggcacagtggctcacacctataatcctagcactttgggaggccgaggttgggggatcaagaggtcaggagttcgagaccagcttggccaacatggtgaaaccccatttctactaaaaatacaaaaactatcctggcacggtgtctggcacctgtaatcccagctactcgggaggccgaggcaggagaatcgctggaacttgggaggcggaggctgcagtgagttgagattatgccattgcactccagcctgggcaacagagcaagactccgtctcaaaaaaaaaaaaaaaaaaaaaaaacatgaaaagaaattatagcaggctaactttttagcttgctaatagcagaaaatctcattcttcccagttcgtgaccctggtctaagggacaggcacactaaccatttaattctctggtttctctacgattaaatcagatcaccagaaacagtgtgatgtcacccaaatcttacttttcaagaaatgcataggtagtgaagcaaactagaaaatacagagaagcaaaaaaaaaaaaaaaaatgttttaggaggctgggcgtgatggcacatgcctgtaatcccggcactttgggaggccaaggtgggcggatcgtttgaagtcagaagttcgagacaagcctggccaacatggtgaaaccccatctctatgaaaaatacaaaaattagccgggtgcggtggcggacgcctgtagtcccagctactcaggaggctgcggcaggagaatcacttgaacccaggaggtggaggttgcagtgagccgagatcgctctccactgcactccagcctgagcgacagaacaagactttgtctcaaaaaaaaaagttttaaaaacactgactagtcccaccattaggagagagagcctcatctgtttggattcatccttccagcctttttctattaatatatctaagtacaggaaaacaaaattgccaggtgtgttggctcatgtccgtaaccccagcaccttgggaggctgatgtgggaggatcacttgaggccaggagctcaagtctgcagtaagctgtagctgcactccagcctgggtaacagaacaagaccctagctctgaaaaaataaaaaatatggccacgcatggtggctcaacccctgctctttgagaggccaatacaggaggatttcttgaggccaggagttcaagaccagcctgggcaacaaaaatgagaccctgtctctacaaaacatttaaaaaatgaaaaagaaaattaaggccgggcgcaatggctcacgcctgtaatcccagcactttgggaggccgaggcaggtggatcacctgaggtcaggagttcgagaccagcccaaccaacatggggaaaccctgtctctactaaacttacaaaattagccgggtgtggtggtgcatgcctgtaatctcagctactcaggaaggctgaggcaggagaatcgcttgaacgcgggaggcagaggttgcagtgagccaagatcgcgccattgcactccagcctgggcaacgagcaaaactccatctcaaaaaaagaaaagaaaagaaaagaaaattaatgggacaacaatacataaattgtttttaaataattttcttaaaaatatggcttggtgtccaggtgcggtggctcacacctgtaatcccagcactttaggaggttgaggtgggcagattacttgaggtcaggagttcaagaccagcctggccaacatggtgaaaacctgtctctactaaaaatacaaaaaaattagccggacatggtggtgcacagctgtagtcccagctactcgggaggctgaggcaggagaattgcttgaacccagggggcagaggttgcagtgagctgagattgcgccactgcaccctagcctgggtgtattttttcaagactccatctcaaaaaacaaaacaaaacaaaacaaaaatatttatatatatatatatatggcatggatgtctttccaaatcactaaactaacatctgcatcatcgtttgtgatgtttgcctagtattccactgtatgaactgtttattcagttctctatctgtggacgtctagtttcttttttttcttttttcttttttttttttttttgagatagagtctctctctattgcccaggctggagtgcagtggcacgatctcggctcactgcaagctccgcctcccaggttcaagtgattctcctgcctcagcctcccaagtagctgggattacaggcgcccaccaccacgccgggctaatttttgtatttttcatagagatggggtttcaccatgttggtcaggctggtcctggtctcgaactcctgacctcgtgatctgcccgccttggcctcccaaactgctgggattacaggtgtgagccactgtgcccagcctttttttttttttttttttttttggctattctaaacaactttgcaatgagtatccttatatgcacattttagtgcaattttctagtgttttgggtatgttttgggggggtgaaataagccaaaagacaattaaaacaataaacactcatatagcttttaactcacgccaggtactgttctaagcgctttgcacatatcaactcatttaatcgtcacgacatctctgggagtaaagaactcttgccatccctgttctatagggagtttaaggggctagcccaaggtcacacagctactaagtggtgaagctgggatttgaaccaggcattctggctcaaagtctgtgtgtactcattctactatgggttactcccagttttaaatgccctctttgcctttcctaagagccaaaaaggaaacggcattggggccgggcacggtggctcacgcctgcaatcccagcgctttgggaggcagaggtgggcggatcacctgaggtcaggagtttgaaaccagcctggccaacatggcaaaaccccatctctactaaacatacaaaaaatagctgggtgtggtggtgggtgcctgtaatcctagctactcgggaggctgaggcaggagaattgcttgaacctaggaggtggagattgcggtgagctgagatcgtgcccctgcactctagcctgggcgacagagcaagactccatctcaattcaaaaagaaaaagaaaaagaaaaacagaaatggcattgggtcaatgtgaggatcttcgactttgtgtccgctgtgtagatacaggtggtagtaaagtcctcttcgagtttagtcccgagaaaagccttgtcttttagggactcacttccttatactagcgtaaaaaaatttacaggaggccattgttttggactaaggtactgcactaggcccaacagtccagagcgaccaaaacgaagtcactcgtggcaggtgcccggtgatcaccctgaactttaaaatgggtcacttttccaaaaaacaggagattcacagcaaccaacagacagggttttagtgcctctgtcacacagatgtcttgtagctatccctatctccttttgaaagtaagtggatacgattaacacgtgaataaaatgaatgaaacaattcatttaacagttcatttaaactaactttttggacccttcttgctttgtaagaattcttggggtcgggaaggtggtgtgctggcactgggaacatcctgttaattgtacttgccagcttaattacctaaacaaagcccaaagccttctagagaaaaggagtaatttgtaattaccagcaactggtttgacacatcaaggcccctattctcattctgaaaaggaagccagcaaacataaagaacaaaaaccttccacttaaaaaaaaaagccccttcacgctctaacgtcttgattcgacactgcaccattgtgagcttgagaacagtactcagtctaaaagcaacgtatccccttagacagctccattctgaccaccaccaaaagctgcggttctccaaaaaattagcaatggctggggagaatacgaatgatttttatttttgctaatatgcatttttttatttttaagaatgagcactttcaggctgggtgcggtggctcacgcctgtaatcccaacactttgggtggccgaggcgggtgaaacacttaagcccaagagtttgacagcagcctgggcaacatggtgaaaccctgtctctacaaaaaatacagaaattacccaggtgtagtggcacgcactgcaggcccagctactcaggaggcagaggttgcagtaagctgagatcgtgccactgtgctctagcctggatgacaggacaagaccctgtctcaaaaaaacaaaccaacaatgaaacaaagatgataacaacccctaccccaaacaaaccccttccttgcttggggaccacactgcctttgtgaaactaacaaatcagccacagattataaattatgactcagaaccaggtgtggtggctcatgccttttgggagctgagcattttgggaggctgaggcaggtggatcatctgaggtcaggagttcgagaccagcctggccaacctggtaaaacccccatctctactaaaaatataaaaattaatcagacatggtggtgggcgcctgtagtcccagctactcgggaggccaaggcacaagaatcacttgaacccgggaggcagaggttgcagtgagccgagatcgcaccactgcactccagcctggacaacagagcaagactccgtctcaaaacaaacaaacaaaactctagcctctgaattttcagaggcagatttgagcaataataaactcctgttcttctgcttagctggctctgtgtttattaaactctttctctgttgcaatactgctgtcttggtaaattggctctctctgtgcagtgggcaagatcaaccctttggatgactctgcattttctttgagaaaaaaattacattagaatgtacaaatcctgtttgttttttgtttgtttttgttttttgtttgttttttgtgagacagggtcttgccctgttgcccaggctggagggcagtggtatgatcaaggctcactgcaatccccacctcccaggttcaaccgattctcccacctcagcctcccaagtagctgggactacaggttcacgccactgcgctcaactaatttttgtattttttgtagaaacaaggttttgtcatgttgaccaggctagtctcaaactcttgggctcaagcaatccacctccctcagcctcccagagtgctgggaatacaggcatgagccacggcacatggcccacaaatcttagttgtaccattttgacaaagtatatactttgggaagaaagggctttttgtttgtttgtttgtttttgagatggagtctcactctgttgcccaggctgaagtgcagtggtgtgatctcggctcactgcagcctccgcctgcccagttcaagtgattctcctgcttcagcctctggagttgctgggattacaggtgcttcccaccacgcccagctaatttttgtattttttagtagagatggggtttcatcatgttggccaggctggtcttgaactcctgacctcaagtgatgcccccacctcagcctcccaaagtgctgggattataggtgtgagccagtgtgcctggccatttatttgattcttattattttttgattcttaattcctgtttttattataccagtaacactaactcattgtagaagaacagacgagccaaaagaacaatcaattattaaagtctgtatacatactaccagggcaagactttctacaaagtcaaaaaacaacagatgttggcaaggacgtagagaagagggaaggcctgcatgctgcttgtgggaatgtaaatcagcacaaccctcaagaaaaaccagcatggagagttctcagagaaccaaaagtagaactaccattctacccaacaatcccaccgtgggtgtccacccaaaggaaaagaaactcttctatccaaaagacacccacactcgcaggtccaatgcagacacccacactcgcaggtccaatgcagacacccacactcgcaggtccattgcagacacccacactcgcaggtccaatgcagacacccacactcgcaggtccaatgcagacacccacacttgcaggtccaatgcagcacaactcacaatagtgaagacatggaatcaatctaagcgcccatccacgggcaactgaataaagaaaatatggcaaatgtataccatggatacccctcagccataaaaaaagaataaaaccatgtcttttgcagcaacatgttggagctggaggccatcatcccaaatgaaacaactcagaaaccaaaagtcaaacaccacatgttctcatgtaaaagtgggagctaaaccatgtgtgcacagggtcatggaatgtgcaataagagagactggagacttggaaaggtggggaggtgggaggagggtgagagatgagaaattacctttttggtacaatgtacactatttgagtgatgggcacaccaaaagcccagacttggccactatataatatatccacgtaacaaaactgcatccgtaccccctaaatctataaaaataaaaaataaacacttttctaaaagaacttttaaagacacctgctttaagcaactacaatttagttaactatgtagtttcaccatactcctaattaagtactacaattcatgctaatagcaaaaatatacctgatacatagagtgaaccagcatctctctctctaaatgttaggttgtgataccatttccttcaaagggaaaaatttcagccgggcacagtggctcatgcctgcaatcccaggactttgggaggccaaggtgggcggatcatttgaggtcaggagttcgagaccatcctggccaacatggtgaaaccccgtctctactaaaaatacaaaaattagctgggcgtggtggcacgtatctgtaatcccagctattcgggaggctgaggcacaagaatcacttgaacccgggaggtggaggttgcagtgagccgagatcacaccaccacagtccagcctgggtgatagagcaagactcagtctcaaaaaaaaaaaggaaaaatttctcctatgctttattctaatttccatatttttctatcagctccttggctttagaaatataggcattcattgcatcttctgtcaacaaccgaaaggggtttggtttggaaaggggttgtgtattagtctgttttcactctgctgtaaagaactgcccaagactgggtaatttataaaggaaagaggtttaattgactttaattgactcacagttcagcatgcctggggaggcctcaggaaacttacaatcatggcagaacgtgaagggaaagcaaccaccttcttcacaaggcggcaggaaggagaagtgctgagcggagggggaagagctccttaaacagccattggatctcgtgagaattcactatccccagatcagcatgtgaggagctgcccccacgatccaaccacccccacctgtggggattataatctcatgagaattcactatccccagatcaggatggggggagctgcccccacgatccaaccacccccacctgtggggattatagggattacaattcaagatgagatgtgggtggggatgcaaagcctaaccatatcagattgttatctttgcttcaaaattaaactataaactaaattcctcctgcatttagcttaacctgtacccatgtacctaccccctcgtgatctgaaacatttgaatttccatcgaaaggatccttatgttccttcccagtaagtcaccaaccaccatacacacacatctaggtaatcattagtctaattcttttcaacctagagtccttttgcctgttttagaatctcttaagtggaatcatactatatgcatcctttgatgcctgtcagcatcatgtctatgcaagtcacccacgatattacatgtatcagcaatttattcctgtttattgttaaatagtattctattttgtgtgtgtgtgtatatatatgtctgtgtgtgtgtgtatatatatatatatatatatgtctgtgtgtgtatatatatatatttttagacagagtttccctcttgtcacccaggctggagtgcaatggtgcgatctcggctcactgcaacctccacctcctgggttcaagtgattctcctgcctcagcctcctgagtagctgggatgacaggcatgtgctaccaggcctggctaattttgtatttttagtagagacggggtttcaccatgttggtcaggctggtctcgcagtcctgacgtcagatgatccgcccgcctcggcctcccaaaatgctgggattacaggtgtgagccaccgtgcctggtctaaatagtattctattatatatattaatatacactatatttttgtttatcaattactctgttgatggatggacattttggtctcttcatcatatgactatcaacagaatgaccagtaactttcttatgtgcaagcattttggtggacctatgttttcatttctcatagataagcatcaaattatatttaatcatagctttaatctgcatttccctgatacctaatggttttgaacaccgtttcatgggcttatttcccatccatatatcttcctttgtgaactgtctgttcaagtcttttgctcatttttaatagggtcgttctcacggctgtaaccccagcactctgggaggctgaggtgggaggattgtttgaacccaggagttcaagaccagcctgggcaacatagtgaaaccccatctctacaaaaatacaaaaaaattagccaggcatggtggcacgtgcctgtagtcccagctactcaggaggctgaggtgggaggacagcttggggccaggaagttgaagctgcagtgagccataattgcatcactgtctgggtgacagagcgagaccttgtctcaaaaaaaaaaaaaaaaaaaagttgacttaaagagctctttgcatattctggatacaagtcctttgtcagatgtgaatttttctcccagtcttgacttatgctttcttaacagagtctttaaagaacagaggtttttaattttgatgaaacaagtttgttactttttgtctttatggttattcactctgtatcctgtttaagaactctttgggctgggtatggcgtcttatgcctataatcctagaacttggggaggccaagatgggaggattgtttgaggtcagaagtttaagatcagcctaagcaacatagcaaaatcttatctctacaaaattaaaattaaaattgactgggtgtggtggcacacacctgcagttccagctgcttgggaggctgagatgggaggattgcttgggctcaggagttcaagattgcagtgagctatgatcgtgccactacactccagcctggatgacacagcaagactcctttcaaaaaaaaaaaaaagaaaagaaaaaagaaaaaaatttttgcccactctcaggtctttttttccccccaagatagagtcttgctctctcgcccagtctagagtgcaatgctgcaatctcagctcactgcaacctccacctcctgggttcaagcaatccttgtgcctcagtctcctgagtactgggactgcaggtgcccgccaccacacctggctaatttttgtatttttagtaaagacggggtttcatcatgttggccaggctggtctcaaacttctggcctccagcgatccgtccgtgttggcctcccaaagtgctgggattacaggcatgagccgctgcaccccgcaggtcttaaagactttctcctagcttttcttttaaacatttacatttaggtctataatctatctggaattaatttttgctcgtggtatgtggtagaggttgaggtttacttttttccccatatagagaactggtggttccagccccatttactgaaaatgctctcctttccccatcaaattgctttggcgtctttgtcaaaatcaatttgcaacaggtctactatgggactcctattctgtcccacttacatgtctatctttaagacaaattatactacctttttttccaagacaaggtcttgctttgtcaccaaggctggagtacagtgacaccatcatagttcgctgtaacctcaaactcctgggctcaagcaatcctcctgccttagcctcccaagtagctaggactacaggtgcacaccaccacacccagctaattttttatttttttgtagagatggagtctcattatgttgcccaagctggtctcaaattcctgggctcaagtgatcctcccacttcagcctcccaaagttttggtattacaggtgtgagcgactacatctggccctatactgtcttgataactgtagctttaaaatcagttggtgtttttctttttttgagattattttggctattctaggttccttaaatttctatataaattttatttttatttatttgagacagtctcgctctgtcacccaggctggagtgcagcggcatggtctcggctcactgcaacctccacctcccaggttcaagcgattctcctgcctcagcctcccgagcagctgggactacaggcacccaccaccacgtccagctaattttttttttttttatgattgaatcttgctctgtggcccaggctggagtgcagtggtgtgatctcagctcactgcaacctctgtctctcaggtacagtcgattctcctcctgcctcagcctcccgattagctgggattacaggcatgtgccacaatgcccagctaatttttgtatttttagtagagaccaggtttcaccacgttggccaggctggccttgaactgctgacctcagctgatccacccgcctcggcctcccaaagtgctggcattacaggctgtgagccaccatgcctcaccctatataaattttaaaacaaactttcaaactttatttaattaaaaaacaaacactttgttggattatgactgggattgcgttgaatctatagtacagtttggagacaggtgacatcttagtggcaagtcttccactccaggaacacggtgtacttcgtttatttgcatgttccttaatttccctctgcagtgttttagagtgttcaatgtaaagactgcatgtgattttatttattcctaagtattttgtgatttgtgacatataaatttatgatttaaatttcatttttgttaccagtatatagaaacacaattgactcatatatccacattgtattctgagaccttgatatatttagttattaattctaataatattttggttgattctgtaagatttttctatatgtaaacagtcatgtcatctatgtacagggacagttttacttcttcctttccaattttttttttttttttgagacagagtctcactctgtcacccaggctggagtgcaatggcgcaatctcagctcactgcaacctctgcctcctgggttcaagtgattctcctgcctcagcctcctgagtagctgagattacaggtgtccaccaccacgcccagctaatttttgtatttttagtagagacggggtttcaccatgttggtcaggctggtctcgaactcctgacctcaggcgatcctcctgccttggcctccaaagtgctgggattacaggcatgagccaccgtgcccggcccctttccaatctttataccttttatttttcttgccttatttcatgggctacgaccgacaatacaatggtgaagtgagtattcttgcctcattcccaatcttaggaggtcggcgttcagtgttttctcattaaatgcatttcacggtgattgtgttttctgcatatgggagaatattacttcttcctttaaaatctgcatgttcttccttttcttatattattcacagacgaatccaacacaatgtcgacactcagtggttagagtgaatgtccttgccttgttcccccacttggaaacattcactcttttcaccatgaagtacttgaaggtttctcacagatgccttttactaggttggaaaagtttccttctattcctgctttgctgagagcttttatcacacataagtgttaaatgttgtcaaatgttttctctgcatctatggagataattgtatgttctttctcgttgttgttttaacctgtcagtatggtgaattacattgattgattttcaaatgttaaaccaaccctgcattcctgggatgaaccacatttagttatgacctatgatcctttttatatattcctggatttaattcacttatttttcttaaggatttttctatctatattcatgaatgatattagtctatggttttcattcaatggctgtgttaggctgtggaatcacagaaatgctggcctcggaacaaactggagagcgttccttctgcctccgctttccaaacaggtgtgtgtacgattggtgttatttcttccttgaatgtttgatagtattcaccatcatctagacctggggtttcctttgtgagaaaaattcctttgatacatgtatattatcattttatgtaaatagtttgtacagatgtgtgtattcttcttgtctatttcatcttgtgtcagtttggtaagatgctttttttaaagaaatttttctattttatccaagttgtctaatttatcaacataaagttgtttgtaaagttatcttattatactttcgaggtctgtcggatctctattcaattatgatattgtaatttttgctttctggctatttcttcatcaatctagccgaagtttatcaattttttccaatcttttcaaagaatcacaatttttatttaaaaaaattcacaatgatttgtctgtctctatttcattgctttatacttctatctttattattaaatattcattattaaattccttcttcttacttggagtttaatttgctcatctttttctagctgctgtaggtggaaattgccatcagagtggtgctaggcgtgggagctgcctcttgaagttcatgataatctgggtgacttccgtataccctgttcgcccagccttccaacatctgtgtgagcagctctctgtgttaaatatctagtacggttttggtttccctgactggactctgaatgttatgaatataaactagcatttcttggccgggcgcagtggctcatgcctgtaaccccagcactttgggaggctgaggcgggcagatcacgaggtcaggagttcaagacgagcctggccaacatagtgaaaccccgtctctactagaaatacaaaaaattaggcaggtgtggtggtgcacgcctgtaatcccagctactcaggaggctgaggcaaaagaatcacttgaacccaggaggctgaggttgcagtaagcagagatcacaccactgcactccagcctgggcaacactgtaagaatctgtctcaaaaaaaaaaaacaacaacaaaaaacaaaaacaaaaagaactagcatttctgaaagtttattccaaaaacattagtcccatgaaatgctcgtgggttctgtgatccagtgagtttggaaagtgccatctactagatttcctctgttgaagactctcaacgcacattaccatattaaccgctggggtaggtgattatagagcgaatattcactgcttctccccacatccgtggaagaagtatggtaccctgacttttgatgtttggtgtatccatccaagtaacttgctttggccaatagaatgtgggtggaagtaacagcgtgccaggtcccagtgtagaccttaggaggtattacagcacttctgccctgagaaaaacatggccaagccacctctctaacctgtttcagggctgagtggaacagatctgaattcaacacttagccagaggcagaactgctgtatcggactatagatttgtatgcaagaaataaatgcttactcttgtatgcagtggtgtgatttttagggtggttgttacacagcaagagctgaccgatacaaacatcccaagcagccctgtaataaacacactcagcttgttcagcttttcatgtccccaaacttatttgatcatagaaccttatttgtatttctaagcaatttggaaaatagtaataaaaacaaactacttgatagggattattcttaaataaaattatcagcattttggaaagacatattctttgcaatgggatttgctacctaatcaatagagtcattcgcttcttaaatttccagagactataccaaaaaggctttttgagattcatcatattattgttaattatccctactacttttcctcttgggagcaccagcttaatctgagatacttagaaaggttggggacatgactggtttcaacacccttttgactatttctctgcacgtgcccacacccacacatccctgtaccttaatcttatgtgctttaaatatttttccctcaaaaccttggaactgctgattagccaattcattttatggaatatttacaccatataacctaattggcaaaattagccctcattgttatcccagtcagccaaatcaggcatcattcctattaaaaggggactggaaaaaaaattacagaaacgatactctgcatttgtttcgcaatgggcagacctatggaaacctatcctcaaggttcagggaagctgagagctggaagaaagaggctgacagatttagttcctcagaaagaaacatttaagatgggcacagtggctcacacttgtaatcccaaaactttaggacggtaagacaggaagattgcttgagcccaggagttcgaaaccagcctgggcaatatggcgaaacctcatctctacaaaaaaaatttaaaaattagcctgatgtggtggcacatgcttgtagtctcagctactcgggaggctgaggtgggcagataatttgtgtccagaggttcttgggcagcagtgaactatgattgtgccactccactccagcctgggagaaagagggagatcctgtctcaataaaacaaagcaaaacagaaagaaacatctaatagagcctcatgagcagaagccatgaggtcccaggcagcagctaggggagatggtgggtccctgcaccgttacccctagacccaggactcgtccaccgtagggaagggttgtgtgggacgctcgcagggaaaggcaggaacgctatgtgaatctgcctcagggcaggatttgtgctgagtacacgttcctatacaagaaaccgtagataaaatagataaaatagaggcattcgctgagctggggtgaatccgaagtcagtaggggagatcagcatccaagagggagctgcatctctgggacataattacttcccagtcatcactcaaagacagacaaatacacacacagccttgccgtgaattggatgcttgaatgaaatacagggcctccatccattttcaatatttcttgttgactctctctttgctttgcccaaagggacggatggcgtgcaggaaatgctgccccaaaatacggtactttcgcttgctgtgtattttaagctcaaggaaactgagaaaacggcagaagcgaagggctctctgatcttccctcacccttttctcccctgaagcaagctacagaaattatttatttttatttatttattttttgagatggagtctcgctccatcacccaggctggagtgcaatggcgtgatctcagctcactgcaacctccgcctcccgggttcaagtgattctcctgcctcaacctcccaagtagctgggattacaggtgtgccccaccatacctggctaattttggtatttttagtagagacggggtttcaccaggttggtcaggttggtctcggactcctgacctcaggtgatccgcccgcctcagcctcccaaagtgctgggattacaggagggagctacggcgcctggcccctttcttttttaatttttaatttttgtagagatggggtcacactgcattgccaaggctgatctcgaactcctggcctcaagtgatcctccagccttggccttgtgaagcgctgggattataggtgtgagccaccatgcccagccacactcggaaaatcttgtacttgtagattaatactgttaaatataatcacgtcttaaaatttctcaagatgaggagctgtttttctcattttgcgtaaacaaacataattctactttaaaaacagaagcatctctctaagttttgttttttcagataatttattgttaaatgaagacatcacaaagcaaaatggagtggggcaggtgtcaaaggtaaactgaaaacgtcgtgtctgccaaacgctattctggtttcctaaggttagaaacaggaaaagtgtcaaatgaaaaggtactcgctcaaattaagtttttttaaaaggtctgtaatttgaaaggaaaacaatttttcactaaaaatatccttattacatgaaagccataatttaaaagacagagaaaaaagctttttaattaacaaataaacagcatctctcagagacacttgggaatgtttgtttttaatcagtgggtcctaaaaatcactgcttccacctgcaaacgaacacgaatccactgtggatggcgtcctctgacccaccctgaagggttctgtttctctccacacacttccttttctgcaactttcagcaaagcaggtttggaagaaagaggattacaaagaactacgactggctccctagtgaataacttaacacggtaaaacccggttttccatttacattacacattcacaatcgctcactgctacttacttcactgacgtatttcacactctctacacacccagcatgatttgtctgaacttaacacagtccccctaagacaaaaaaaaatatctcctaaggacctctgagaacacagcggtgttcaaaggccacgtcctcgcacacaacacccagacctgccacgcagccggtactgtttcctgagctcatccgagcaagcgtctccacggggcaaagcaaggccttgaggatcccgctaacataacttacaaattattgggaggccgaggcgggtggatcacaaggtcaggtgttcgagaccagcctggccaacatggtgaaaccccgtctctactaaaaatacaaaaattagctgggcgtggtggtgggcacctgtaatcccagctgctcaggaggctgaggcaggagagtcgcttgagcctgggaggtgaaggttgcagtgagctgagttggcgccattccactcagcctgggcaacagagcgagactccatgtcaaaaaaaaaaaaaaaaaagacattgaccacttaaacgaccacagcatgaaatcagacagaaaaatccatttttatcaataaatgctgcgtcacttgctcttccaaacacaggaagcattttttgctctgcacgtgactgaggagactgtgggtcccagggtggcccctccctgggtcccagccgagcttcagcccggcaagctcagaccacgggtggactgcaggccccgtccacagggcgtcgatgcattggggcacagcggactgatgctgttgtctgcagaggacagcgtggctctccaggactccagcgactgcgcacgacggcgattgtcgctgcacctgctgctgtggctccggggcaccgcggggctcagttcagctttcggcgcagatggaggccatcggcagaaacccggagctacagccgagctgagcttacagtgctcggtaaccctcaggcactggaaataatttggatgtgttcaaggggaatatctagtttgttctttccaatattggaagaaaaaagtaaaaccatcagccactttctttactcaaacaccacagggattggcaggaggtcccaagaaggggttaggggaggacggggtggcgggaggcaggtctgaagccaccgcaccctggtccaccccgctgctgggccacgccagccgaattcacacggtccttggggacatttcagttgactgtcacctgcctccgtacggtggtgtgagaggaatgcgcgccaccacggcggccaggttttgacatcgttccctactctgaatgcaccttagcttgtctggtgtcgggggatgggggcacagatttcctcagctttgccacttttttttagagatggaggctcactatgttgccagaccggtctcgaattcttgggctcaagagatcctcctgcctcagtttccaagtagctgagactacaggcgccagccaccgtgcccagccttccttgctttctgaattagacctaaggcactggcagaaaccctctgcaattctgacgccatcgagatcctaagactgagtcaactctagctcctctcatgatgaaccaggtcatcgcctgcgtctgcctcctccgggtggccgcaggtcttagggccaccgcttcctgtcctgagtgtccactccccacgtggactcccaaaaagtgtgttttccaagcacactcttagaatgctgtttctctcaaaaaaaggccgtccactccgttttgccttatgaaaaaatgggaaagtattctgaaagtattccaaaagcccaaaacacctatcggagactcacggaagcctgcggagacggtcaccagataccaagggttcgaggcgtttctcagagcctgtgcttggaactgaccgtcaggaagcaatcggagccgaagccgctgctcccaaacctggccgcccatcggcctggccttcccggagcaggtggcaacacggagaacctttttttttaaaaaaaaaaggcatcttaaattgtggtttgggattttcttttttttttatatcatgaaaaaagatttagagaattacaagagtttaggttaataggaaacacaaatggaggtggaaatttaaaaacaaaggaatggaactcaactctccacagattgaacccacacaggtgtcactgtttactgaattagcaccacttttgtgcagtgaagacacccgtggctgagatttcttaaatctcactttttccatgcttttcttctgacaaactgaccacggagggagagctctcctcccccctccctatcccagactgctgctgctttcctgcaattctggtggtctttttgttgcctcatctgattgagactttggggaaacaacacagcagcaaaccaggacatatattccctctaaaaacagcttgaaaattacaacacaaagatctcaataattatgagatgcagtgattttttcttttttttctcttcccccggccgcgcttggaggtatctctaggttagactcctctggggctggaatgacgtgaagggtaaggtcgcccagcttggccagggcagtcgggggcaggacagcgggagagccggtccgaccccagcccagcctgctgggtcagcattcatcagagaggtcgtcgctgcccgggagctccgcggcttcgagctccacgctggacagaaacctcctcagcgtcttgcggcagttgtaatccagggtggtggtgtagacggccttggggtacttggggtacacgatggtggtactgaggaagcgggtgggcctgtggcgtggctcgaagcgcacctcggccttgtagttgcgccacgtgccattggggacacaggtgaccgtctggctgcaggaggccaccgccaggcccaggggcagctgcacgtcgtcgatgaagtgcctctcggagtcgtacttgaccaaggaggtgtacctgggcgggagacataagaggccgcgtgaagccgctcctctgagccgggggcttggggtccccactgtgaccgtgagtcatttgtggggtgcacatgtagaaacgtggccgccccagtgagaagcagcatagggtcacagagtctataaagtacttactatgtgccaggtacccgtcgtctaagtactttacttacgggatccaatttaatctccccaacgaccctgagagaagaaaccgaggtgcagaggtgaaggtcacagcgccactgagtactggagctgggatttaaatacaggggtgcaggcttccaaagctggccccacatcactgttagccactgcgggcagcagccctggatcctgctcccactcgcacaagcttaagacctcagccaagttacttcactcttccgagcctccgtttcctctttttttttttttttttttgagatggagtctcgctctgtcacccaggctagagtgcagtggtgcaatctcagctcactgcaacctccgcctcccaggttaaagtgattctcctgcctcagcctcctgagtagctgggattacaggcgcccgccaccacgccctgctaatttttgtatttctactagagacggggtttcaccatgttgaccaggctggtctcaaactcccgacctcaggtgatctgcctgccttggcctcccaaaacgctgggattatagacatgaaccactgcacctggcctctttttttgtgttttttttttttaaacaacatatcttttattctttgtagagatgaggacttcctgtgtcgcccaggctggtcctaaactcctgggctcgagcaatcctcctgcatcagcctcccagagtgctgggattacaggcatgagccgccgcacccaccctatcagctctttaatgagaggataaaggaacccagaaaccttgaatgctggttctgaaagtttggctataccaaatattaatactttgttcaccttggcatttggtttggggaccctccctaaacctacatatctgggtatctgacttatcaatgaaagccaattatcatcttgatttccataagataaattagcatctgtgttcctcaggcatttaattttttcaagtccttcttttaattttgggagtcagttttcttttcttttctttcttttttttttttttgtttttcggaaatggagtctcgctttctcgcccactctggagtggtgcagtggggtggtctcagctcaccacagcctccacctcctgggcccaagcgatcctctcacctcagcctcctgcgtagctgggactacaggcgtgcaccaccattcccaggtaatttttgtattttttgtagagacagggtttcactgttgttgcccaggctggtctcgaactcctgcttcagtctgccagaatgctggattctaggcgtgagccaccgtgcctggcccaaaagttacttttcttacagaagcaaagctttaatgcattttactgaatgcttatagctttgtagatactgaaaagagtatgagcgtcacatacagacacatctaacagcactgcctccaaccagcccctacccactggtcaggtgagtaagaatcagaattcttttctgtgagtggaacggaaatttcatctctcctcctcaggcaagtagttaagaggctggtgggagtcatggccccattttgttcaaaatacaagctccacaggaacaaaaggctgaactgctcacctcccaactgatgaacctcgtctttgttccatgtcaaaggggcctttgtgttactgcagcagaaactccagctatcaaaccatcaggtaccaaaagtaaaactcctttctctaaaaagacctctctttacctgagcctttcaatgcatctttgcccccagataatcctggatgagataatccccagaggaagaccagcgcttgcctagtgaaattatactatgagacaaggttaaaagacctcagagactgggttggcaggtaagggagtagggtacagcagcttctggaaagaagaattaatatttgacaaaattgtaaccctctgacagccatgatacatgaattgcaaaaagaaaatgcagaactttatacataacatgatctcatttttattttaattttaaaagcatgtctatatatttaattggttagaatgcaggaacagaaagaggacccaccaaactattaatcatctctgtcatacttttgcaattaactaattttttataacaacaagcattaatatctggaataaaaaataaaaattgttaaaaaaaaaaaaagaataaaattggggcctgctatatttaccttacttcctttggtggtaaggggtcaaactccactccttcgccaaaggacaggggacaaagcctcagcgcacagccgggagccagggggagagacgctggactcttcaaggacagagaagaatgcagttagagctcttacgggccatttcttttattttttatttttttttattttttatttttgtgagacagagtctcgctctgttacccaggctggagtgcaatcgtacaatctcagctcactgcaacctctgcctcccaggttcaagcaattcgcctgcctcagcctcctgagtagctggaattacaggcatgtgccaccacgcttggccaatttttttttttttttgtatttttagtagagacggggtttcgtcatgttggccaggctggtctcgaactcctgacctcagatgatccgcccacctcggcctcccaaagtgctgggattacaggcgtgagccaccgcacccggcccccacgggccatttctaagcattgcccacagaaggctgtgggtctgagcctccagctgatgggcccaactgggatctgtgtcccccatgctgggcacaccagagaaacgctggacagggagcagagaggtctgggttcaaatcccaggttgaccacgaccgtgccgtgagccctcagaggagccacatcacaagccctgtgaccctatcaacacagcaaagtggatgccccctttcactgctaaggttgtgtgaaaagctgcaaagaggaaacaaactcaagccagactgccacccctcgccctgcggtgagaaaccctggtgagccgaggctcacttcacccgaatcctcaattcgacagcgctccctctgtcaccgtctcagcaacactctagaaaaggtcaaaacaaaaaatatgctaccagggaattttttgttttctaactaaagattcaatctggccaagcgcagtggcccacacctgtaatcccagcattttgggaggtggaggtgggaggatcccttgcgcccaggagtttgagaccagcctggacaacatggcaagaccccatctctacaaaaaatacaacaattagctgggtgtggtggtacgcgcctgtagtcccagctactcaggaggcttaggtgggaggatcgtttgagcctgggaggttgaggctgcaatgagctgagatcgccactacactccagtctaggcaacaaagcgggcagaacaatagactctgtctttaaagaaaaaactttcattggtaagatggacaccaggccgggcacagtagctcacacctgtaatcccagcactttgggaggccaaggcaggtggctcacccgaggttgggagttcgacaccagcctggccaacgtggcgaaaccccgtctctactaaaaatacaaaaatgagccaggcatggtgctgtgtgcctgaagtcccagctactaggaaggctgaggcacgggaatcgcttgaacccaggagacagaggttgcagtgagccgagatcatgccactgcactccagcctgggcgacagagtgggactctgtgtcaaaaaaaaaaaaaaaaaaaaaagagagacggacaccacatgttcttcctgtcactttccgctatccagaatactcagtgaaccagagcacagcaggacttccagcccggccaatgcatgggacgttctgattaaccaagaaggctcactagaagtcagttacatcctagacatggggctagttttcacccaatttgcaggatcagggcttccgtgttaaagagtgcaaagataaacacggtgcagagcctgaactcggaagccctttatgttccctggttcactcgggatctatcattttttttgcctaatttgagagaaggatgtacatttgcgccagggtgtggagttggcagccccacccccacatctcccgaggacagagaaggaggcaaacgtttctagaaggttggctctgagacctttatcctgagaccaggacaaggtgtgtcaagtaggggcatggggtggaaatgcgaaagccaaaggggaccagaacagagacgcagagggccctgagggtccaggtcctgaacctgggtggaggcttagcaaggccgggctagacgaggggcggtgggtgggagccaaggtcagtgaattgtgtgtgtgtgtggcaggggagggtacataaggtgtttgtgtgtgtgttggggggagggtacataaggtgtgtgtgtgtttgtgttggggggagggtacataaggtgtgtgtgtgttgggggtacataaggtatgtgtgtgttgggggtacataaggtgtgtgtgtgtgtgtgtgtgtgttgggtatataaggtgtgtgcgtgtgnnnnnnnnnnnnnnnnnnnnnnnnnnnnnnnnnnnnnnnnnnnnnnnnnnnnnnnnnnnnnnnnnnnnnnnnnnnnnnnnnnnnnnnnnnnnnnnnnnnnnnnnnnnnnnnnnnnnnnnnnnnnnnnnnnnnnnnnnnnnnnnnnnnnnnnnnnnnnnnnnnnnnnnnnnnnnnnnnnnnnnnnnnnnnnnnnnnnnnnnnnnnnnnnnnnnnnnnnnnnnnnnnnnnnnnnnnnnnnnnnnnnnnnnnnnnnnnnnnnnnnnnnnnnnnnnnnnnnnnnnnnnnnnnnnnnnnnnnnnnnnnnnnnnnnnnnnnnnnnnnnnnnnnnnnnnnnnnnnnnnnnnnnnnnnnnnnnnnnnnnnnnnnnnnnnnnnnnnnnnnnnnnnnnnnnnnnnnnnnnnnnnnnnnnnnnnnnnnnnnnnnnnnnnnnnnnnnnnnnnnnnnnnnnnnnnnnnnnnnnnnnnnnnnnnnnnnnnnnnnnnnnnnnnnnnnnnnnnnnnnnnnnnnnnnnnnnnnnnnnnnnnnnnnnnnnnnnnnnnnnnnnnnnnnnnnnnnnnnnnnnnnnnnnnnnnnnnnnnnnnnnnnnnnnnnnnnnnnnnnnnnnnnnnnnnnnnnnnnnnnnnnnnnnnnnnnnnnnnnnnnnnnnnnnnnnnnnnnnnnnnnnnnnnnnnnnnnnnnnnnnnnnnnnnnnnnnnnnnnnnnnnnnnnnnnnnnnnnnnnnnnnnnnnnnnnnnnnnnnnnnnnnnnnnnnnnnnnnnnnnnnnnnnnnnnnnnnnnnnnnnnnnnnnnnnnnnnnnnnnnnnnnnnnnnnnnnnnnnnnnnnnnnnnnnnnnnnnnnnnnnnnnnnnnnnnnnnnnnnnnnnnnnnnnnnnnnnnnnnnnnnnnnnnnnnnnnnnnnnnnnnnnnnnnnnnnnnnnnnnnnnnnnnnnnnnnnnnnnnnnnnnnnnnnnnnnnnnnnnnnnnnnnnnnnnnnnnnnnnnnnnnnnnnnnnnnnnnnnnnnnnnnnnnnnnnnnnnnnnnnnnnnnnnnnnnnnnnnnnnnnnnnnnnnnnnnnnnnnnnnnnnnnnnnnnnnnnnnnnnnnnnnnnnnnnnnnnnnnnnnnnnnnnnnnnnnnnnnnnnnnnnnnnnnnnnnnnnnnnnnnnnnnnnnnnnnnnnnnnnnnnnnnnnnnnnnnnnnnnnnnnnnnnnnnnnnnnnnnnnnnnnnnnnnnnnnnnnnnnnnnnnnnnnnnnnnnnnnnnnnnnnnnnnnnnnnnnnnnnnnnnnnnnnnnnnnnnnnnnnnnnnnnnnnnnnnnnnnnnnnnnnnnnnnnnnnnnnnnnnnnnnnnnnnnnnnnnnnnnnnnnnnnnnnnnnnnnnnnnnnnnnnnnnnnnnnnnnnnnnnnnnnnnnnnnnnnnnnnnnnnnnnnnnnnnnnnnnnnnnnnnnnnnnnnnnnnnnnnnnnnnnnnnnnnnnnnnnnnnnnnnnnnnnnnnnnnnnnnnnnnnnnnnnnnnnnnnnnnnnnnnnnnnnnnnnnnnnnnnnnnnnnnnnnnnnnnnnnnnnnnnnnnnnnnnnnnnnnnnnnnnnnnnnnnnnnnnnnnnnnnnnnnnnnnnnnnnnnnnnnnnnnnnnnnnnnnnnnnnnnnnnnnnnnnnnnnnnnnnnnnnnnnnnnnnnnnnnnnnnnnnnnnnnnnnnnnnnnnnnnnnnnnnnnnnnnnnnnnnnnnnnnnnnnnnnnnnnnnnnnnnnnnnnnnnnnnnnnnnnnnnnnnnnnnnnnnnnnnnnnnnnnnnnnnnnnnnnnnnnnnnnnnnnnnnnnnnnnnnnnnnnnnnnnnnnnnnnnnnnnnnnnnnnnnnnnnnnnnnnnnnnnnnnnnnnnnnnnnnnnnnnnnnnnnnnnnnnnnnnnnnnnnnnnnnnnnnnnnnnnnnnnnnnnnnnnnnnnnnnnnnnnnnnnnnnnnnnnnnnnnnnnnnnnnnnnnnnnnnnnnnnnnnnnnnnnnnnnnnnnnnnnnnnnnnnnnnnnnnnnnnnnnnnnnnnnnnnnnnnnnnnnnnnnnnnnnnnnnnnnnnnnnnnnnnnnnnnnnnnnnnnnnnnnnnnnnnnnnnnnnnnnnnnnnnnnnnnnnnnnnnnnnnnnnnnnnnnnnnnnnnnnnnnnnnnnnnnnnnnnnnnnnnnnnnnnnnnnnnnnnnnnnnnnnnnnnnnnnnnnnnnnnnnnnnnnnnnnnnnnnnnnnnnnnnnnnnnnnnnnnnnnnnnnnnnnnnnnnnnnnnnnnnnnnnnnnnnnnnnnnnnnnnnnnnnnnnnnnnnnnnnnnnnnnnnnnnnnnnnnnnnnnnnnnnnnnnnnnnnnnnnnnnnnnnnnnnnnnnnnnnnnnnnnnnnnnnnnnnnnnnnnnnnnnnnnnnnnnnnnnnnnnnnnnnnnnnnnnnnnnnnnnnnnnnnnnnnnnnnnnnnnnnnnnnnnnnnnnnnnnnnnnnnnnnnnnnnnnnnnnnnnnnnnnnnnnnnnnnnnnnnnnnnnnnnnnnnnnnnnnnnnnnnnnnnnnnnnnnnnnnnnnnnnnnnnnnnnnnnnnnnnnnnnnnnnnnnnnnnnnnnnnnnnnnnnnnnnnnnnnnnnnnnnnnnnnnnnnnnnnnnnnnnnnnnnnnnnnnnnnnnnnnnnnnnnnnnnnnnnnnnnnnnnnnnnnnnnnnnnnnnnnnnnnnnnnnnnnnnnnnnnnnnnnnnnnnnnnnnnnnnnnnnnnnnnnnnnnnnnnnnnnnnnnnnnnnnnnnnnnnnnnnnnnnnnnnnnnnnnnnnnnnnnnnnnnnnnnnnnnnnnnnnnnnnnnnnnnnnnnnnnnnnnnnnnnnnnnnnnnnnnnnnnnnnnnnnnnnnnnnnnnnnnnnnnnnnnnnnnnnnnnnnnnnnnnnnnnnnnnnnnnnnnnnnnnnnnnnnnnnnnnnnnnnnnnnnnnnnnnnnnnnnnnnnnnnnnnnnnnnnnnnnnnnnnnnnnnnnnnnnnnnnnnnnnnnnnnnnnnnnnnnnnnnnnnnnnnnnnnnnnnnnnnnnnnnnnnnnnnnnnnnnnnnnnnnnnnnnnnnnnnnnnnnnnnnnnnnnnnnnnnnnnnnnnnnnnnnnnnnnnnnnnnnnnnnnnnnnnnnnnnnnnnnnnnnnnnnnnnnnnnnnnnnnnnnnnnnnnnnnnnnnnnnnnnnnnnnnnnnnnnnnnnnnnnnnnnnnnnnnnnnnnnnnnnnnnnnnnnnnnnnnnnnnnnnnnnnnnnnnnnnnnnnnnnnnnnnnnnnnnnnnnnnnnnnnnnnnnnnnnnnnnnnnnnnnnnnnnnnnnnnnnnnnnnnnnnnnnnnnnnnnnnnnnnnnnnnnnnnnnnnnnnnnnnnnnnnnnnnnnnnnnnnnnnnnnnnnnnnnnnnnnnnnnnnnnnnnnnnnnnnnnnnnnnnnnnnnnnnnnnnnnnnnnnnnnnnnnnnnnnnnnnnnnnnnnnnnnnnnnnnnnnnnnnnnnnnnnnnnnnnnnnnnnnnnnnnnnnnnnnnnnnnnnnnnnnnnnnnnnnnnnnnnnnnnnnnnnnnnnnnnnnnnnnnnnnnnnnnnnnnnnnnnnnnnnnnnnnnnnnnnnnnnnnnnnnnnnnnnnnnnnnnnnnnnnnnnnnnnnnnnnnnnnnnnnnnnnnnnnnnnnnnnnnnnnnnnnnnnnnnnnnnnnnnnnnnnnnnnnnnnnnnnnnnnnnnnnnnnnnnnnnnnnnnnnnnnnnnnnnnnnnnnnnnnnnnnnnnnnnnnnnnnnnnnnnnnnnnnnnnnnnnnnnnnnnnnnnnnnnnnnnnnnnnnnnnnnnnnnnnnnnnnnnnnnnnnnnnnnnnnnnnnnnnnnnnnnnnnnnnnnnnnnnnnnnnnnnnnnnnnnnnnnnnnnnnnnnnnnnnnnnnnnnnnnnnnnnnnnnnnnnnnnnnnnnnnnnnnnnnnnnnnnnnnnnnnnnnnnnnnnnnnnnnnnnnnnnnnnnnnnnnnnnnnnnnnnnnnnnnnnnnnnnnnnnnnnnnnnnnnnnnnnnnnnnnnnnnnnnnnnnnnnnnnnnnnnnnnnnnnnnnnnnnnnnnnnnnnnnnnnnnnnnnnnnnnnnnnnnnnnnnnnnnnnnnnnnnnnnnnnnnnnnnnnnnnnnnnnnnnnnnnnnnnnnnnnnnnnnnnnnnnnnnnnnnnnnnnnnnnnnnnnnnnnnnnnnnnnnnnnnnnnnnnnnnnnnnnnnnnnnnnnnnnnnnnnnnnnnnnnnnnnnnnnnnnnnnnnnnnnnnnnnnnnnnnnnnnnnnnnnnnnnnnnnnnnnnnnnnnnnnnnnnnnnnnnnnnnnnnnnnnnnnnnnnnnnnnnnnnnnnnnnnnnnnnnnnnnnnnnnnnnnnnnnnnnnnnnnnnnnnnnnnnnnnnnnnnnnnnnnnnnnnnnnnnnnnnnnnnnnnnnnnnnnnnnnnnnnnnnnnnnnnnnnnnnnnnnnnnnnnnnnnnnnnnnnnnnnnnnnnnnnnnnnnnnnnnnnnnnnnnnnnnnnnnnnnnnnnnnnnnnnnnnnnnnnnnnnnnnnnnnnnnnnnnnnnnnnnnnnnnnnnnnnnnnnnnnnnnnnnnnnnnnnnnnnnnnnnnnnnnnnnnnnnnnnnnnnnnnnnnnnnnnnnnnnnnnnnnnnnnnnnnnnnnnnnnnnnnnnnnnnnnnnnnnnnnnnnnnnnnnnnnnnnnnnnnnnnnnnnnnnnnnnnnnnnnnnnnnnnnnnnnnnnnnnnnnnnnnnnnnnnnnnnnnnnnnnnnnnnnnnnnnnnnnnnnnnnnnnnnnnnnnnnnnnnnnnnnnnnnnnnnnnnnnnnnnnnnnnnnnnnnnnnnnnnnnnnnnnnnnnnnnnnnnnnnnnnnnnnnnnnnnnnnnnnnnnnnnnnnnnnnnnnnnnnnnnnnnnnnnnnnnnnnnnnnnnnnnnnnnnnnnnnnnnnnnnnnnnnnnnnnnnnnnnnnnnnnnnnnnnnnnnnnnnnnnnnnnnnnnnnnnnnnnnnnnnnnnnnnnnnnnnnnnnnnnnnnnnnnnnnnnnnnnnnnnnnnnnnnnnnnnnnnnnnnnnnnnnnnnnnnnnnnnnnnnnnnnnnnnnnnnnnnnnnnnnnnnnnnnnnnnnnnnnnnnnnnnnnnnnnnnnnnnnnnnnnnnnnnnnnnnnnnnnnnnnnnnnnnnnnnnnnnnnnnnnnnnnnnnnnnnnnnnnnnnnnnnnnnnnnnnnnnnnnnnnnnnnnnnnnnnnnnnnnnnnnnnnnnnnnnnnnnnnnnnnnnnnnnnnnnnnnnnnnnnnnnnnnnnnnnnnnnnnnnnnnnnnnnnnnnnnnnnnnnnnnnnnnnnnnnnnnnnnnnnnnnnnnnnnnnnnnnnnnnnnnnnnnnnnnnnnnnnnnnnnnnnnnnnnnnnnnnnnnnnnnnnnnnnnnnnnnnnnnnnnnnnnnnnnnnnnnnnnnnnnnnnnnnnnnnnnnnnnnnnnnnnnnnnnnnnnnnnnnnnnnnnnnnnnnnnnnnnnnnnnnnnnnnnnnnnnnnnnnnnnnnnnnnnnnnnnnnnnnnnnnnnnnnnnnnnnnnnnnnnnnnnnnnnnnnnnnnnnnnnnnnnnnnnnnnnnnnnnnnnnnnnnnnnnnnnnnnnnnnnnnnnnnnnnnnnnnnnnnnnnnnnnnnnnnnnnnnnnnnnnnnnnnnnnnnnnnnnnnnnnnnnnnnnnnnnnnnnnnnnnnnnnnnnnnnnnnnnnnnnnnnnnnnnnnnnnnnnnnnnnnnnnnnnnnnnnnnnnnnnnnnnnnnnnnnnnnnnnnnnnnnnnnnnnnnnnnnnnnnnnnnnnnnnnnnnnnnnnnnnnnnnnnnnnnnnnnnnnnnnnnnnnnnnnnnnnnnnnnnnnnnnnnnnnnnnnnnnnnnnnnnnnnnnnnnnnnnnnnnnnnnnnnnnnnnnnnnnnnnnnnnnnnnnnnnnnnnnnnnnnnnnnnnnnnnnnnnnnnnnnnnnnnnnnnnnnnnnnnnnnnnnnnnnnnnnnnnnnnnnnnnnnnnnnnnnnnnnnnnnnnnnnnnnnnnnnnnnnnnnnnnnnnnnnnnnnnnnnnnnnnnnnnnnnnnnnnnnnnnnnnnnnnnnnnnnnnnnnnnnnnnnnnnnnnnnnnnnnnnnnnnnnnnnnnnnnnnnnnnnnnnnnnnnnnnnnnnnnnnnnnnnnnnnnnnnnnnnnnnnnnnnnnnnnnnnnnnnnnnnnnnnnnnnnnnnnnnnnnnnnnnnnnnnnnnnnnnnnnnnnnnnnnnnnnnnnnnnnnnnnnnnnnnnnnnnnnnnnnnnnnnnnnnnnnnnnnnnnnnnnnnnnnnnnnnnnnnnnnnnnnnnnnnnnnnnnnnnnnnnnnnnnnnnnnnnnnnnnnnnnnnnnnnnnnnnnnnnnnnnnnnnnnnnnnnnnnnnnnnnnnnnnnnnnnnnnnnnnnnnnnnnnnnnnnnnnnnnnnnnnnnnnnnnnnnnnnnnnnnnnnnnnnnnnnnnnnnnnnnnnnnnnnnnnnnnnnnnnnnnnnnnnnnnnnnnnnnnnnnnnnnnnnnnnnnnnnnnnnnnnnnnnnnnnnnnnnnnnnnnnnnnnnnnnnnnnnnnnnnnnnnnnnnnnnnnnnnnnnnnnnnnnnnnnnnnnnnnnnnnnnnnnnnnnnnnnnnnnnnnnnnnnnnnnnnnnnnnnnnnnnnnnnnnnnnnnnnnnnnnnnnnnnnnnnnnnnnnnnnnnnnnnnnnnnnnnnnnnnnnnnnnnnnnnnnnnnnnnnnnnnnnnnnnnnnnnnnnnnnnnnnnnnnnnnnnnnnnnnnnnnnnnnnnnnnnnnnnnnnnnnnnnnnnnnnnnnnnnnnnnnnnnnnnnnnnnnnnnnnnnnnnnnnnnnnnnnnnnnnnnnnnnnnnnnnnnnnnnnnnnnnnnnnnnnnnnnnnnnnnnnnnnnnnnnnnnnnnnnnnnnnnnnnnnnnnnnnnnnnnnnnnnnnnnnnnnnnnnnnnnnnnnnnnnnnnnnnnnnnnnnnnnnnnnnnnnnnnnnnnnnnnnnnnnnnnnnnnnnnnnnnnnnnnnnnnnnnnnnnnnnnnnnnnnnnnnnnnnnnnnnnnnnnnnnnnnnnnnnnnnnnnnnnnnnnnnnnnnnnnnnnnnnnnnnnnnnnnnnnnnnnnnnnnnnnnnnnnnnnnnnnnnnnnnnnnnnnnnnnnnnnnnnnnnnnnnnnnnnnnnnnnnnnnnnnnnnnnnnnnnnnnnnnnnnnnnnnnnnnnnnnnnnnnnnnnnnnnnnnnnnnnnnnnnnnnnnnnnnnnnnnnnnnnnnnnnnnnnnnnnnnnnnnnnnnnnnnnnnnnnnnnnnnnnnnnnnnnnnnnnnnnnnnnnnnnnnnnnnnnnnnnnnnnnnnnnnnnnnnnnnnnnnnnnnnnnnnnnnnnnnnnnnnnnnnnnnnnnnnnnnnnnnnnnnnnnnnnnnnnnnnnnnnnnnnnnnnnnnnnnnnnnnnnnnnnnnnnnnnnnnnnnnnnnnnnnnnnnnnnnnnnnnnnnnnnnnnnnnnnnnnnnnnnnnnnnnnnnnnnnnnnnnnnnnnnnnnnnnnnnnnnnnnnnnnnnnnnnnnnnnnnnnnnnnnnnnnnnnnnnnnnnnnnnnnnnnnnnnnnnnnnnnnnnnnnnnnnnnnnnnnnnnnnnnnnnnnnnnnnnnnnnnnnnnnnnnnnnnnnnnnnnnnnnnnnnnnnnnnnnnnnnnnnnnnnnnnnnnnnnnnnnnnnnnnnnnnnnnnnnnnnnnnnnnnnnnnnnnnnnnnnnnnnnnnnnnnnnnnnnnnnnnnnnnnnnnnnnnnnnnnnnnnnnnnnnnnnnnnnnnnnnnnnnnnnnnnnnnnnnnnnnnnnnnnnnnnnnnnnnnnnnnnnnnnnnnnnnnnnnnnnnnnnnnnnnnnnnnnnnnnnnnnnnnnnnnnnnnnnnnnnnnnnnnnnnnnnnnnnnnnnnnnnnnnnnnnnnnnnnnnnnnnnnnnnnnnnnnnnnnnnnnnnnnnnnnnnnnnnnnnnnnnnnnnnnnnnnnnnnnnnnnnnnnnnnnnnnnnnnnnnnnnnnnnnnnnnnnnnnnnnnnnnnnnnnnnnnnnnnnnnnnnnnnnnnnnnnnnnnnnnnnnnnnnnnnnnnnnnnnnnnnnnnnnnnnnnnnnnnnnnnnnnnnnnnnnnnnnnnnnnnnnnnnnnnnnnnnnnnnnnnnnnnnnnnnnnnnnnnnnnnnnnnnnnnnnnnnnnnnnnnnnnnnnnnnnnnnnnnnnnnnnnnnnnnnnnnnnnnnnnnnnnnnnnnnnnnnnnnnnnnnnnnnnnnnnnnnnnnnnnnnnnnnnnnnnnnnnnnnnnnnnnnnnnnnnnnnnnnnnnnnnnnnnnnnnnnnnnnnnnnnnnnnnnnnnnnnnnnnnnnnnnnnnnnnnnnnnnnnnnnnnnnnnnnnnnnnnnnnnnnnnnnnnnnnnnnnnnnnnnnnnnnnnnnnnnnnnnnnnnnnnnnnnnnnnnnnnnnnnnnnnnnnnnnnnnnnnnnnnnnnnnnnnnnnnnnnnnnnnnnnnnnnnnnnnnnnnnnnnnnnnnnnnnnnnnnnnnnnnnnnnnnnnnnnnnnnnnnnnnnnnnnnnnnnnnnnnnnnnnnnnnnnnnnnnnnnnnnnnnnnnnnnnnnnnnnnnnnnnnnnnnnnnnnnnnnnnnnnnnnnnnnnnnnnnnnnnnnnnnnnnnnnnnnnnnnnnnnnnnnnnnnnnnnnnnnnnnnnnnnnnnnnnnnnnnnnnnnnnnnnnnnnnnnnnnnnnnnnnnnnnnnnnnnnnnnnnnnnnnnnnnnnnnnnnnnnnnnnnnnnnnnnnnnnnnnnnnnnnnnnnnnnnnnnnnnnnnnnnnnnnnnnnnnnnnnnnnnnnnnnnnnnnnnnnnnnnnnnnnnnnnnnnnnnnnnnnnnnnnnnnnnnnnnnnnnnnnnnnnnnnnnnnnnnnnnnnnnnnnnnnnnnnnnnnnnnnnnnnnnnnnnnnnnnnnnnnnnnnnnnnnnnnnnnnnnnnnnnnnnnnnnnnnnnnnnnnnnnnnnnnnnnnnnnnnnnnnnnnnnnnnnnnnnnnnnnnnnnnnnnnnnnnnnnnnnnnnnnnnnnnnnnnnnnnnnnnnnnnnnnnnnnnnnnnnnnnnnnnnnnnnnnnnnnnnnnnnnnnnnnnnnnnnnnnnnnnnnnnnnnnnnnnnnnnnnnnnnnnnnnnnnnnnnnnnnnnnnnnnnnnnnnnnnnnnnnnnnnnnnnnnnnnnnnnnnnnnnnnnnnnnnnnnnnnnnnnnnnnnnnnnnnnnnnnnnnnnnnnnnnnnnnnnnnnnnnnnnnnnnnnnnnnnnnnnnnnnnnnnnnnnnnnnnnnnnnnnnnnnnnnnnnnnnnnnnnnnnnnnnnnnnnnnnnnnnnnnnnnnnnnnnnnnnnnnnnnnnnnnnnnnnnnnnnnnnnnnnnnnnnnnnnnnnnnnnnnnnnnnnnnnnnnnnnnnnnnnnnnnnnnnnnnnnnnnnnnnnnnnnnnnnnnnnnnnnnnnnnnnnnnnnnnnnnnnnnnnnnnnnnnnnnnnnnnnnnnnnnnnnnnnnnnnnnnnnnnnnnnnnnnnnnnnnnnnnnnnnnnnnnnnnnnnnnnnnnnnnnnnnnnnnnnnnnnnnnnnnnnnnnnnnnnnnnnnnnnnnnnnnnnnnnnnnnnnnnnnnnnnnnnnnnnnnnnnnnnnnnnnnnnnnnnnnnnnnnnnnnnnnnnnnnnnnnnnnnnnnnnnnnnnnnnnnnnnnnnnnnnnnnnnnnnnnnnnnnnnnnnnnnnnnnnnnnnnnnnnnnnnnnnnnnnnnnnnnnnnnnnnnnnnnnnnnnnnnnnnnnnnnnnnnnnnnnnnnnnnnnnnnnnnnnnnnnnnnnnnnnnnnnnnnnnnnnnnnnnnnnnnnnnnnnnnnnnnnnnnnnnnnnnnnnnnnnnnnnnnnnnnnnnnnnnnnnnnnnnnnnnnnnnnnnnnnnnnnnnnnnnnnnnnnnnnnnnnnnnnnnnnnnnnnnnnnnnnnnnnnnnnnnnnnnnnnnnnnnnnnnnnnnnnnnnnnnnnnnnnnnnnnnnnnnnnnnnnnnnnnnnnnnnnnnnnnnnnnnnnnnnnnnnnnnnnnnnnnnnnnnnnnnnnnnnnnnnnnnnnnnnnnnnnnnnnnnnnnnnnnnnnnnnnnnnnnnnnnnnnnnnnnnnnnnnnnnnnnnnnnnnnnnnnnnnnnnnnnnnnnnnnnnnnnnnnnnnnnnnnnnnnnnnnnnnnnnnnnnnnnnnnnnnnnnnnnnnnnnnnnnnnnnnnnnnnnnnnnnnnnnnnnnnnnnnnnnnnnnnnnnnnnnnnnnnnnnnnnnnnnnnnnnnnnnnnnnnnnnnnnnnnnnnnnnnnnnnnnnnnnnnnnnnnnnnnnnnnnnnnnnnnnnnnnnnnnnnnnnnnnnnnnnnnnnnnnnnnnnnnnnnnnnnnnnnnnnnnnnnnnnnnnnnnnnnnnnnnnnnnnnnnnnnnnnnnnnnnnnnnnnnnnnnnnnnnnnnnnnnnnnnnnnnnnnnnnnnnnnnnnnnnnnnnnnnnnnnnnnnnnnnnnnnnnnnnnnnnnnnnnnnnnnnnnnnnnnnnnnnnnnnnnnnnnnnnnnnnnnnnnnnnnnnnnnnnnnnnnnnnnnnnnnnnnnnnnnnnnnnnnnnnnnnnnnnnnnnnnnnnnnnnnnnnnnnnnnnnnnnnnnnnnnnnnnnnnnnnnnnnnnnnnnnnnnnnnnnnnnnnnnnnnnnnnnnnnnnnnnnnnnnnnnnnnnnnnnnnnnnnnnnnnnnnnnnnnnnnnnnnnnnnnnnnnnnnnnnnnnnnnnnnnnnnnnnnnnnnnnnnnnnnnnnnnnnnnnnnnnnnnnnnnnnnnnnnnnnnnnnnnnnnnnnnnnnnnnnnnnnnnnnnnnnnnnnnnnnnnnnnnnnnnnnnnnnnnnnnnnnnnnnnnnnnnnnnnnnnnnnnnnnnnnnnnnnnnnnnnnnnnnnnnnnnnnnnnnnnnnnnnnnnnnnnnnnnnnnnnnnnnnnnnnnnnnnnnnnnnnnnnnnnnnnnnnnnnnnnnnnnnnnnnnnnnnnnnnnnnnnnnnnnnnnnnnnnnnnnnnnnnnnnnnnnnnnnnnnnnnnnnnnnnnnnnnnnnnnnnnnnnnnnnnnnnnnnnnnnnnnnnnnnnnnnnnnnnnnnnnnnnnnnnnnnnnnnnnnnnnnnnnnnnnnnnnnnnnnnnnnnnnnnnnnnnnnnnnnnnnnnnnnnnnnnnnnnnnnnnnnnnnnnnnnnnnnnnnnnnnnnnnnnnnnnnnnnnnnnnnnnnnnnnnnnnnnnnnnnnnnnnnnnnnnnnnnnnnnnnnnnnnnnnnnnnnnnnnnnnnnnnnnnnnnnnnnnnnnnnnnnnnnnnnnnnnnnnnnnnnnnnnnnnnnnnnnnnnnnnnnnnnnnnnnnnnnnnnnnnnnnnnnnnnnnnnnnnnnnnnnnnnnnnnnnnnnnnnnnnnnnnnnnnnnnnnnnnnnnnnnnnnnnnnnnnnnnnnnnnnnnnnnnnnnnnnnnnnnnnnnnnnnnnnnnnnnnnnnnnnnnnnnnnnnnnnnnnnnnnnnnnnnnnnnnnnnnnnnnnnnnnnnnnnnnnnnnnnnnnnnnnnnnnnnnnnnnnnnnnnnnnnnnnnnnnnnnnnnnnnnnnnnnnnnnnnnnnnnnnnnnnnnnnnnnnnnnnnnnnnnnnnnnnnnnnnnnnnnnnnnnnnnnnnnnnnnnnnnnnnnnnnnnnnnnnnnnnnnnnnnnnnnnnnnnnnnnnnnnnnnnnnnnnnnnnnnnnnnnnnnnnnnnnnnnnnnnnnnnnnnnnnnnnnnnnnnnnnnnnnnnnnnnnnnnnnnnnnnnnnnnnnnnnnnnnnnnnnnnnnnnnnnnnnnnnnnnnnnnnnnnnnnnnnnnnnnnnnnnnnnnnnnnnnnnnnnnnnnnnnnnnnnnnnnnnnnnnnnnnnnnnnnnnnnnnnnnnnnnnnnnnnnnnnnnnnnnnnnnnnnnnnnnnnnnnnnnnnnnnnnnnnnnnnnnnnnnnnnnnnnnnnnnnnnnnnnnnnnnnnnnnnnnnnnnnnnnnnnnnnnnnnnnnnnnnnnnnnnnnnnnnnnnnnnnnnnnnnnnnnnnnnnnnnnnnnnnnnnnnnnnnnnnnnnnnnnnnnnnnnnnnnnnnnnnnnnnnnnnnnnnnnnnnnnnnnnnnnnnnnnnnnnnnnnnnnnnnnnnnnnnnnnnnnnnnnnnnnnnnnnnnnnnnnnnnnnnnnnnnnnnnnnnnnnnnnnnnnnnnnnnnnnnnnnnnnnnnnnnnnnnnnnnnnnnnnnnnnnnnnnnnnnnnnnnnnnnnnnnnnnnnnnnnnnnnnnnnnnnnnnnnnnnnnnnnnnnnnnnnnnnnnnnnnnnnnnnnnnnnnnnnnnnnnnnnnnnnnnnnnnnnnnnnnnnnnnnnnnnnnnnnnnnnnnnnnnnnnnnnnnnnnnnnnnnnnnnnnnnnnnnnnnnnnnnnnnnnnnnnnnnnnnnnnnnnnnnnnnnnnnnnnnnnnnnnnnnnnnnnnnnnnnnnnnnnnnnnnnnnnnnnnnnnnnnnnnnnnnnnnnnnnnnnnnnnnnnnnnnnnnnnnnnnnnnnnnnnnnnnnnnnnnnnnnnnnnnnnnnnnnnnnnnnnnnnnnnnnnnnnnnnnnnnnnnnnnnnnnnnnnnnnnnnnnnnnnnnnnnnnnnnnnnnnnnnnnnnnnnnnnnnnnnnnnnnnnnnnnnnnnnnnnnnnnnnnnnnnnnnnnnnnnnnnnnnnnnnnnnnnnnnnnnnnnnnnnnnnnnnnnnnnnnnnnnnnnnnnnnnnnnnnnnnnnnnnnnnnnnnnnnnnnnnnnnnnnnnnnnnnnnnnnnnnnnnnnnnnnnnnnnnnnnnnnnnnnnnnnnnnnnnnnnnnnnnnnnnnnnnnnnnnnnnnnnnnnnnnnnnnnnnnnnnnnnnnnnnnnnnnnnnnnnnnnnnnnnnnnnnnnnnnnnnnnnnnnnnnnnnnnnnnnnnnnnnnnnnnnnnnnnnnnnnnnnnnnnnnnnnnnnnnnnnnnnnnnnnnnnnnnnnnnnnnnnnnnnnnnnnnnnnnnnnnnnnnnnnnnnnnnnnnnnnnnnnnnnnnnnnnnnnnnnnnnnnnnnnnnnnnnnnnnnnnnnnnnnnnnnnnnnnnnnnnnnnnnnnnnnnnnnnnnnnnnnnnnnnnnnnnnnnnnnnnnnnnnnnnnnnnnnnnnnnnnnnnnnnnnnnnnnnnnnnnnnnnnnnnnnnnnnnnnnnnnnnnnnnnnnnnnnnnnnnnnnnnnnnnnnnnnnnnnnnnnnnnnnnnnnnnnnnnnnnnnnnnnnnnnnnnnnnnnnnnnnnnnnnnnnnnnnnnnnnnnnnnnnnnnnnnnnnnnnnnnnnnnnnnnnnnnnnnnnnnnnnnnnnnnnnnnnnnnnnnnnnnnnnnnnnnnnnnnnnnnnnnnnnnnnnnnnnnnnnnnnnnnnnnnnnnnnnnnnnnnnnnnnnnnnnnnnnnnnnnnnnnnnnnnnnnnnnnnnnnnnnnnnnnnnnnnnnnnnnnnnnnnnnnnnnnnnnnnnnnnnnnnnnnnnnnnnnnnnnnnnnnnnnnnnnnnnnnnnnnnnnnnnnnnnnnnnnnnnnnnnnnnnnnnnnnnnnnnnnnnnnnnnnnnnnnnnnnnnnnnnnnnnnnnnnnnnnnnnnnnnnnnnnnnnnnnnnnnnnnnnnnnnnnnnnnnnnnnnnnnnnnnnnnnnnnnnnnnnnnnnnnnnnnnnnnnnnnnnnnnnnnnnnnnnnnnnnnnnnnnnnnnnnnnnnnnnnnnnnnnnnnnnnnnnnnnnnnnnnnnnnnnnnnnnnnnnnnnnnnnnnnnnnnnnnnnnnnnnnnnnnnnnnnnnnnnnnnnnnnnnnnnnnnnnnnnnnnnnnnnnnnnnnnnnnnnnnnnnnnnnnnnnnnnnnnnnnnnnnnnnnnnnnnnnnnnnnnnnnnnnnnnnnnnnnnnnnnnnnnnnnnnnnnnnnnnnnnnnnnnnnnnnnnnnnnnnnnnnnnnnnnnnnnnnnnnnnnnnnnnnnnnnnnnnnnnnnnnnnnnnnnnnnnnnnnnnnnnnnnnnnnnnnnnnnnnnnnnnnnnnnnnnnnnnnnnnnnnnnnnnnnnnnnnnnnnnnnnnnnnnnnnnnnnnnnnnnnnnnnnnnnnnnnnnnnnnnnnnnnnnnnnnnnnnnnnnnnnnnnnnnnnnnnnnnnnnnnnnnnnnnnnnnnnnnnnnnnnnnnnnnnnnnnnnnnnnnnnnnnnnnnnnnnnnnnnnnnnnnnnnnnnnnnnnnnnnnnnnnnnnnnnnnnnnnnnnnnnnnnnnnnnnnnnnnnnnnnnnnnnnnnnnnnnnnnnnnnnnnnnnnnnnnnnnnnnnnnnnnnnnnnnnnnnnnnnnnnnnnnnnnnnnnnnnnnnnnnnnnnnnnnnnnnnnnnnnnnnnnnnnnnnnnnnnnnnnnnnnnnnnnnnnnnnnnnnnnnnnnnnnnnnnnnnnnnnnnnnnnnnnnnnnnnnnnnnnnnnnnnnnnnnnnnnnnnnnnnnnnnnnnnnnnnnnnnnnnnnnnnnnnnnnnnnnnnnnnnnnnnnnnnnnnnnnnnnnnnnnnnnnnnnnnnnnnnnnnnnnnnnnnnnnnnnnnnnnnnnnnnnnnnnnnnnnnnnnnnnnnnnnnnnnnnnnnnnnnnnnnnnnnnnnnnnnnnnnnnnnnnnnnnnnnnnnnnnnnnnnnnnnnnnnnnnnnnnnnnnnnnnnnnnnnnnnnnnnnnnnnnnnnnnnnnnnnnnnnnnnnnnnnnnnnnnnnnnnnnnnnnnnnnnnnnnnnnnnnnnnnnnnnnnnnnnnnnnnnnnnnnnnnnnnnnnnnnnnnnnnnnnnnnnnnnnnnnnnnnnnnnnnnnnnnnnnnnnnnnnnnnnnnnnnnnnnnnnnnnnnnnnnnnnnnnnnnnnnnnnnnnnnnnnnnnnnnnnnnnnnnnnnnnnnnnnnnnnnnnnnnnnnnnnnnnnnnnnnnnnnnnnnnnnnnnnnnnnnnnnnnnnnnnnnnnnnnnnnnnnnnnnnnnnnnnnnnnnnnnnnnnnnnnnnnnnnnnnnnnnnnnnnnnnnnnnnnnnnnnnnnnnnnnnnnnnnnnnnnnnnnnnnnnnnnnnnnnnnnnnnnnnnnnnnnnnnnnnnnnnnnnnnnnnnnnnnnnnnnnnnnnnnnnnnnnnnnnnnnnnnnnnnnnnnnnnnnnnnnnnnnnnnnnnnnnnnnnnnnnnnnnnnnnnnnnnnnnnnnnnnnnnnnnnnnnnnnnnnnnnnnnnnnnnnnnnnnnnnnnnnnnnnnnnnnnnnnnnnnnnnnnnnnnnnnnnnnnnnnnnnnnnnnnnnnnnnnnnnnnnnnnnnnnnnnnnnnnnnnnnnnnnnnnnnnnnnnnnnnnnnnnnnnnnnnnnnnnnnnnnnnnnnnnnnnnnnnnnnnnnnnnnnnnnnnnnnnnnnnnnnnnnnnnnnnnnnnnnnnnnnnnnnnnnnnnnnnnnnnnnnnnnnnnnnnnnnnnnnnnnnnnnnnnnnnnnnnnnnnnnnnnnnnnnnnnnnnnnnnnnnnnnnnnnnnnnnnnnnnnnnnnnnnnnnnnnnnnnnnnnnnnnnnnnnnnnnnnnnnnnnnnnnnnnnnnnnnnnnnnnnnnnnnnnnnnnnnnnnnnnnnnnnnnnnnnnnnnnnnnnnnnnnnnnnnnnnnnnnnnnnnnnnnnnnnnnnnnnnnnnnnnnnnnnnnnnnnnnnnnnnnnnnnnnnnnnnnnnnnnnnnnnnnnnnnnnnnnnnnnnnnnnnnnnnnnnnnnnnnnnnnnnnnnnnnnnnnnnnnnnnnnnnnnnnnnnnnnnnnnnnnnnnnnnnnnnnnnnnnnnnnnnnnnnnnnnnnnnnnnnnnnnnnnnnnnnnnnnnnnnnnnnnnnnnnnnnnnnnnnnnnnnnnnnnnnnnnnnnnnnnnnnnnnnnnnnnnnnnnnnnnnnnnnnnnnnnnnnnnnnnnnnnnnnnnnnnnnnnnnnnnnnnnnnnnnnnnnnnnnnnnnnnnnnnnnnnnnnnnnnnnnnnnnnnnnnnnnnnnnnnnnnnnnnnnnnnnnnnnnnnnnnnnnnnnnnnnnnnnnnnnnnnnnnnnnnnnnnnnnnnnnnnnnnnnnnnnnnnnnnnnnnnnnnnnnnnnnnnnnnnnnnnnnnnnnnnnnnnnnnnnnnnnnnnnnnnnnnnnnnnnnnnnnnnnnnnnnnnnnnnnnnnnnnnnnnnnnnnnnnnnnnnnnnnnnnnnnnnnnnnnnnnnnnnnnnnnnnnnnnnnnnnnnnnnnnnnnnnnnnnnnnnnnnnnnnnnnnnnnnnnnnnnnnnnnnnnnnnnnnnnnnnnnnnnnnnnnnnnnnnnnnnnnnnnnnnnnnnnnnnnnnnnnnnnnnnnnnnnnnnnnnnnnnnnnnnnnnnnnnnnnnnnnnnnnnnnnnnnnnnnnnnnnnnnnnnnnnnnnnnnnnnnnnnnnnnnnnnnnnnnnnnnnnnnnnnnnnnnnnnnnnnnnnnnnnnnnnnnnnnnnnnnnnnnnnnnnnnnnnnnnnnnnnnnnnnnnnnnnnnnnnnnnnnnnnnnnnnnnnnnnnnnnnnnnnnnnnnnnnnnnnnnnnnnnnnnnnnnnnnnnnnnnnnnnnnnnnnnnnnnnnnnnnnnnnnnnnnnnnnnnnnnnnnnnnnnnnnnnnnnnnnnnnnnnnnnnnnnnnnnnnnnnnnnnnnnnnnnnnnnnnnnnnnnnnnnnnnnnnnnnnnnnnnnnnnnnnnnnnnnnnnnnnnnnnnnnnnnnnnnnnnnnnnnnnnnnnnnnnnnnnnnnnnnnnnnnnnnnnnnnnnnnnnnnnnnnnnnnnnnnnnnnnnnnnnnnnnnnnnnnnnnnnnnnnnnnnnnnnnnnnnnnnnnnnnnnnnnnnnnnnnnnnnnnnnnnnnnnnnnnnnnnnnnnnnnnnnnnnnnnnnnnnnnnnnnnnnnnnnnnnnnnnnnnnnnnnnnnnnnnnnnnnnnnnnnnnnnnnnnnnnnnnnnnnnnnnnnnnnnnnnnnnnnnnnnnnnnnnnnnnnnnnnnnnnnnnnnnnnnnnnnnnnnnnnnnnnnnnnnnnnnnnnnnnnnnnnnnnnnnnnnnnnnnnnnnnnnnnnnnnnnnnnnnnnnnnnnnnnnnnnnnnnnnnnnnnnnnnnnnnnnnnnnnnnnnnnnnnnnnnnnnnnnnnnnnnnnnnnnnnnnnnnnnnnnnnnnnnnnnnnnnnnnnnnnnnnnnnnnnnnnnnnnnnnnnnnnnnnnnnnnnnnnnnnnnnnnnnnnnnnnnnnnnnnnnnnnnnnnnnnnnnnnnnnnnnnnnnnnnnnnnnnnnnnnnnnnnnnnnnnnnnnnnnnnnnnnnnnnnnnnnnnnnnnnnnnnnnnnnnnnnnnnnnnnnnnnnnnnnnnnnnnnnnnnnnnnnnnnnnnnnnnnnnnnnnnnnnnnnnnnnnnnnnnnnnnnnnnnnnnnnnnnnnnnnnnnnnnnnnnnnnnnnnnnnnnnnnnnnnnnnnnnnnnnnnnnnnnnnnnnnnnnnnnnnnnnnnnnnnnnnnnnnnnnnnnnnnnnnnnnnnnnnnnnnnnnnnnnnnnnnnnnnnnnnnnnnnnnnnnnnnnnnnnnnnnnnnnnnnnnnnnnnnnnnnnnnnnnnnnnnnnnnnnnnnnnnnnnnnnnnnnnnnnnnnnnnnnnnnnnnnnnnnnnnnnnnnnnnnnnnnnnnnnnnnnnnnnnnnnnnnnnnnnnnnnnnnnnnnnnnnnnnnnnnnnnnnnnnnnnnnnnnnnnnnnnnnnnnnnnnnnnnnnnnnnnnnnnnnnnnnnnnnnnnnnnnnnnnnnnnnnnnnnnnnnnnnnnnnnnnnnnnnnnnnnnnnnnnnnnnnnnnnnnnnnnnnnnnnnnnnnnnnnnnnnnnnnnnnnnnnnnnnnnnnnnnnnnnnnnnnnnnnnnnnnnnnnnnnnnnnnnnnnnnnnnnnnnnnnnnnnnnnnnnnnnnnnnnnnnnnnnnnnnnnnnnnnnnnnnnnnnnnnnnnnnnnnnnnnnnnnnnnnnnnnnnnnnnnnnnnnnnnnnnnnnnnnnnnnnnnnnnnnnnnnnnnnnnnnnnnnnnnnnnnnnnnnnnnnnnnnnnnnnnnnnnnnnnnnnnnnnnnnnnnnnnnnnnnnnnnnnnnnnnnnnnnnnnnnnnnnnnnnnnnnnnnnnnnnnnnnnnnnnnnnnnnnnnnnnnnnnnnnnnnnnnnnnnnnnnnnnnnnnnnnnnnnnnnnnnnnnnnnnnnnnnnnnnnnnnnnnnnnnnnnnnnnnnnnnnnnnnnnnnnnnnnnnnnnnnnnnnnnnnnnnnnnnnnnnnnnnnnnnnnnnnnnnnnnnnnnnnnnnnnnnnnnnnnnnnnnnnnnnnnnnnnnnnnnnnnnnnnnnnnnnnnnnnnnnnnnnnnnnnnnnnnnnnnnnnnnnnnnnnnnnnnnnnnnnnnnnnnnnnnnnnnnnnnnnnnnnnnnnnnnnnnnnnnnnnnnnnnnnnnnnnnnnnnnnnnnnnnnnnnnnnnnnnnnnnnnnnnnnnnnnnnnnnnnnnnnnnnnnnnnnnnnnnnnnnnnnnnnnnnnnnnnnnnnnnnnnnnnnnnnnnnnnnnnnnnnnnnnnnnnnnnnnnnnnnnnnnnnnnnnnnnnnnnnnnnnnnnnnnnnnnnnnnnnnnnnnnnnnnnnnnnnnnnnnnnnnnnnnnnnnnnnnnnnnnnnnnnnnnnnnnnnnnnnnnnnnnnnnnnnnnnnnnnnnnnnnnnnnnnnnnnnnnnnnnnnnnnnnnnnnnnnnnnnnnnnnnnnnnnnnnnnnnnnnnnnnnnnnnnnnnnnnnnnnnnnnnnnnnnnnnnnnnnnnnnnnnnnnnnnnnnnnnnnnnnnnnnnnnnnnnnnnnnnnnnnnnnnnnnnnnnnnnnnnnnnnnnnnnnnnnnnnnnnnnnnnnnnnnnnnnnnnnnnnnnnnnnnnnnnnnnnnnnnnnnnnnnnnnnnnnnnnnnnnnnnnnnnnnnnnnnnnnnnnnnnnnnnnnnnnnnnnnnnnnnnnnnnnnnnnnnnnnnnnnnnnnnnnnnnnnnnnnnnnnnnnnnnnnnnnnnnnnnnnnnnnnnnnnnnnnnnnnnnnnnnnnnnnnnnnnnnnnnnnnnnnnnnnnnnnnnnnnnnnnnnnnnnnnnnnnnnnnnnnnnnnnnnnnnnnnnnnnnnnnnnnnnnnnnnnnnnnnnnnnnnnnnnnnnnnnnnnnnnnnnnnnnnnnnnnnnnnnnnnnnnnnnnnnnnnnnnnnnnnnnnnnnnnnnnnnnnnnnnnnnnnnnnnnnnnnnnnnnnnnnnnnnnnnnnnnnnnnnnnnnnnnnnnnnnnnnnnnnnnnnnnnnnnnnnnnnnnnnnnnnnnnnnnnnnnnnnnnnnnnnnnnnnnnnnnnnnnnnnnnnnnnnnnnnnnnnnnnnnnnnnnnnnnnnnnnnnnnnnnnnnnnnnnnnnnnnnnnnnnnnnnnnnnnnnnnnnnnnnnnnnnnnnnnnnnnnnnnnnnnnnnnnnnnnnnnnnnnnnnnnnnnnnnnnnnnnnnnnnnnnnnnnnnnnnnnnnnnnnnnnnnnnnnnnnnnnnnnnnnnnnnnnnnnnnnnnnnnnnnnnnnnnnnnnnnnnnnnnnnnnnnnnnnnnnnnnnnnnnnnnnnnnnnnnnnnnnnnnnnnnnnnnnnnnnnnnnnnnnnnnnnnnnnnnnnnnnnnnnnnnnnnnnnnnnnnnnnnnnnnnnnnnnnnnnnnnnnnnnnnnnnnnnnnnnnnnnnnnnnnnnnnnnnnnnnnnnnnnnnnnnnnnnnnnnnnnnnnnnnnnnnnnnnnnnnnnnnnnnnnnnnnnnnnnnnnnnnnnnnnnnnnnnnnnnnnnnnnnnnnnnnnnnnnnnnnnnnnnnnnnnnnnnnnnnnnnnnnnnnnnnnnnnnnnnnnnnnnnnnnnnnnnnnnnnnnnnnnnnnnnnnnnnnnnnnnnnnnnnnnnnnnnnnnnnnnnnnnnnnnnnnnnnnnnnnnnnnnnnnnnnnnnnnnnnnnnnnnnnnnnnnnnnnnnnnnnnnnnnnnnnnnnnnnnnnnnnnnnnnnnnnnnnnnnnnnnnnnnnnnnnnnnnnnnnnnnnnnnnnnnnnnnnnnnnnnnnnnnnnnnnnnnnnnnnnnnnnnnnnnnnnnnnnnnnnnnnnnnnnnnnnnnnnnnnnnnnnnnnnnnnnnnnnnnnnnnnnnnnnnnnnnnnnnnnnnnnnnnnnnnnnnnnnnnnnnnnnnnnnnnnnnnnnnnnnnnnnnnnnnnnnnnnnnnnnnnnnnnnnnnnnnnnnnnnnnnnnnnnnnnnnnnnnnnnnnnnnnnnnnnnnnnnnnnnnnnnnnnnnnnnnnnnnnnnnnnnnnnnnnnnnnnnnnnnnnnnnnnnnnnnnnnnnnnnnnnnnnnnnnnnnnnnnnnnnnnnnnnnnnnnnnnnnnnnnnnnnnnnnnnnnnnnnnnnnnnnnnnnnnnnnnnnnnnnnnnnnnnnnnnnnnnnnnnnnnnnnnnnnnnnnnnnnnnnnnnnnnnnnnnnnnnnnnnnnnnnnnnnnnnnnnnnnnnnnnnnnnnnnnnnnnnnnnnnnnnnnnnnnnnnnnnnnnnnnnnnnnnnnnnnnnnnnnnnnnnnnnnnnnnnnnnnnnnnnnnnnnnnnnnnnnnnnnnnnnnnnnnnnnnnnnnnnnnnnnnnnnnnnnnnnnnnnnnnnnnnnnnnnnnnnnnnnnnnnnnnnnnnnnnnnnnnnnnnnnnnnnnnnnnnnnnnnnnnnnnnnnnnnnnnnnnnnnnnnnnnnnnnnnnnnnnnnnnnnnnnnnnnnnnnnnnnnnnnnnnnnnnnnnnnnnnnnnnnnnnnnnnnnnnnnnnnnnnnnnnnnnnnnnnnnnnnnnnnnnnnnnnnnnnnnnnnnnnnnnnnnnnnnnnnnnnnnnnnnnnnnnnnnnnnnnnnnnnnnnnnnnnnnnnnnnnnnnnnnnnnnnnnnnnnnnnnnnnnnnnnnnnnnnnnnnnnnnnnnnnnnnnnnnnnnnnnnnnnnnnnnnnnnnnnnnnnnnnnnnnnnnnnnnnnnnnnnnnnnnnnnnnnnnnnnnnnnnnnnnnnnnnnnnnnnnnnnnnnnnnnnnnnnnnnnnnnnnnnnnnnnnnnnnnnnnnnnnnnnnnnnnnnnnnnnnnnnnnnnnnnnnnnnnnnnnnnnnnnnnnnnnnnnnnnnnnnnnnnnnnnnnnnnnnnnnnnnnnnnnnnnnnnnnnnnnnnnnnnnnnnnnnnnnnnnnnnnnnnnnnnnnnnnnnnnnnnnnnnnnnnnnnnnnnnnnnnnnnnnnnnnnnnnnnnnnnnnnnnnnnnnnnnnnnnnnnnnnnnnnnnnnnnnnnnnnnnnnnnnnnnnnnnnnnnnnnnnnnnnnnnnnnnnnnnnnnnnnnnnnnnnnnnnnnnnnnnnnnnnnnnnnnnnnnnnnnnnnnnnnnnnnnnnnnnnnnnnnnnnnnnnnnnnnnnnnnnnnnnnnnnnnnnnnnnnnnnnnnnnnnnnnnnnnnnnnnnnnnnnnnnnnnnnnnnnnnnnnnnnnnnnnnnnnnnnnnnnnnnnnnnnnnnnnnnnnnnnnnnnnnnnnnnnnnnnnnnnnnnnnnnnnnnnnnnnnnnnnnnnnnnnnnnnnnnnnnnnnnnnnnnnnnnnnnnnnnnnnnnnnnnnnnnnnnnnnnnnnnnnnnnnnnnnnnnnnnnnnnnnnnnnnnnnnnnnnnnnnnnnnnnnnnnnnnnnnnnnnnnnnnnnnnnnnnnnnnnnnnnnnnnnnnnnnnnnnnnnnnnnnnnnnnnnnnnnnnnnnnnnnnnnnnnnnnnnnnnnnnnnnnnnnnnnnnnnnnnnnnnnnnnnnnnnnnnnnnnnnnnnnnnnnnnnnnnnnnnnnnnnnnnnnnnnnnnnnnnnnnnnnnnnnnnnnnnnnnnnnnnnnnnnnnnnnnnnnnnnnnnnnnnnnnnnnnnnnnnnnnnnnnnnnnnnnnnnnnnnnnnnnnnnnnnnnnnnnnnnnnnnnnnnnnnnnnnnnnnnnnnnnnnnnnnnnnnnnnnnnnnnnnnnnnnnnnnnnnnnnnnnnnnnnnnnnnnnnnnnnnnnnnnnnnnnnnnnnnnnnnnnnnnnnnnnnnnnnnnnnnnnnnnnnnnnnnnnnnnnnnnnnnnnnnnnnnnnnnnnnnnnnnnnnnnnnnnnnnnnnnnnnnnnnnnnnnnnnnnnnnnnnnnnnnnnnnnnnnnnnnnnnnnnnnnnnnnnnnnnnnnnnnnnnnnnnnnnnnnnnnnnnnnnnnnnnnnnnnnnnnnnnnnnnnnnnnnnnnnnnnnnnnnnnnnnnnnnnnnnnnnnnnnnnnnnnnnnnnnnnnnnnnnnnnnnnnnnnnnnnnnnnnnnnnnnnnnnnnnnnnnnnnnnnnnnnnnnnnnnnnnnnnnnnnnnnnnnnnnnnnnnnnnnnnnnnnnnnnnnnnnnnnnnnnnnnnnnnnnnnnnnnnnnnnnnnnnnnnnnnnnnnnnnnnnnnnnnnnnnnnnnnnnnnnnnnnnnnnnnnnnnnnnnnnnnnnnnnnnnnnnnnnnnnnnnnnnnnnnnnnnnnnnnnnnnnnnnnnnnnnnnnnnnnnnnnnnnnnnnnnnnnnnnnnnnnnnnnnnnnnnnnnnnnnnnnnnnnnnnnnnnnnnnnnnnnnnnnnnnnnnnnnnnnnnnnnnnnnnnnnnnnnnnnnnnnnnnnnnnnnnnnnnnnnnnnnnnnnnnnnnnnnnnnnnnnnnnnnnnnnnnnnnnnnnnnnnnnnnnnnnnnnnnnnnnnnnnnnnnnnnnnnnnnnnnnnnnnnnnnnnnnnnnnnnnnnnnnnnnnnnnnnnnnnnnnnnnnnnnnnnnnnnnnnnnnnnnnnnnnnnnnnnnnnnnnnnnnnnnnnnnnnnnnnnnnnnnnnnnnnnnnnnnnnnnnnnnnnnnnnnnnnnnnnnnnnnnnnnnnnnnnnnnnnnnnnnnnnnnnnnnnnnnnnnnnnnnnnnnnnnnnnnnnnnnnnnnnnnnnnnnnnnnnnnnnnnnnnnnnnnnnnnnnnnnnnnnnnnnnnnnnnnnnnnnnnnnnnnnnnnnnnnnnnnnnnnnnnnnnnnnnnnnnnnnnnnnnnnnnnnnnnnnnnnnnnnnnnnnnnnnnnnnnnnnnnnnnnnnnnnnnnnnnnnnnnnnnnnnnnnnnnnnnnnnnnnnnnnnnnnnnnnnnnnnnnnnnnnnnnnnnnnnnnnnnnnnnnnnnnnnnnnnnnnnnnnnnnnnnnnnnnnnnnnnnnnnnnnnnnnnnnnnnnnnnnnnnnnnnnnnnnnnnnnnnnnnnnnnnnnnnnnnnnnnnnnnnnnnnnnnnnnnnnnnnnnnnnnnnnnnnnnnnnnnnnnnnnnnnnnnnnnnnnnnnnnnnnnnnnnnnnnnnnnnnnnnnnnnnnnnnnnnnnnnnnnnnnnnnnnnnnnnnnnnnnnnnnnnnnnnnnnnnnnnnnnnnnnnnnnnnnnnnnnnnnnnnnnnnnnnnnnnnnnnnnnnnnnnnnnnnnnnnnnnnnnnnnnnnnnnnnnnnnnnnnnnnnnnnnnnnnnnnnnnnnnnnnnnnnnnnnnnnnnnnnnnnnnnnnnnnnnnnnnnnnnnnnnnnnnnnnnnnnnnnnnnnnnnnnnnnnnnnnnnnnnnnnnnnnnnnnnnnnnnnnnnnnnnnnnnnnnnnnnnnnnnnnnnnnnnnnnnnnnnnnnnnnnnnnnnnnnnnnnnnnnnnnnnnnnnnnnnnnnnnnnnnnnnnnnnnnnnnnnnnnnnnnnnnnnnnnnnnnnnnnnnnnnnnnnnnnnnnnnnnnnnnnnnnnnnnnnnnnnnnnnnnnnnnnnnnnnnnnnnnnnnnnnnnnnnnnnnnnnnnnnnnnnnnnnnnnnnnnnnnnnnnnnnnnnnnnnnnnnnnnnnnnnnnnnnnnnnnnnnnnnnnnnnnnnnnnnnnnnnnnnnnnnnnnnnnnnnnnnnnnnnnnnnnnnnnnnnnnnnnnnnnnnnnnnnnnnnnnnnnnnnnnnnnnnnnnnnnnnnnnnnnnnnnnnnnnnnnnnnnnnnnnnnnnnnnnnnnnnnnnnnnnnnnnnnnnnnnnnnnnnnnnnnnnnnnnnnnnnnnnnnnnnnnnnnnnnnnnnnnnnnnnnnnnnnnnnnnnnnnnnnnnnnnnnnnnnnnnnnnnnnnnnnnnnnnnnnnnnnnnnnnnnnnnnnnnnnnnnnnnnnnnnnnnnnnnnnnnnnnnnnnnnnnnnnnnnnnnnnnnnnnnnnnnnnnnnnnnnnnnnnnnnnnnnnnnnnnnnnnnnnnnnnnnnnnnnnnnnnnnnnnnnnnnnnnnnnnnnnnnnnnnnnnnnnnnnnnnnnnnnnnnnnnnnnnnnnnnnnnnnnnnnnnnnnnnnnnnnnnnnnnnnnnnnnnnnnnnnnnnnnnnnnnnnnnnnnnnnnnnnnnnnnnnnnnnnnnnnnnnnnnnnnnnnnnnnnnnnnnnnnnnnnnnnnnnnnnnnnnnnnnnnnnnnnnnnnnnnnnnnnnnnnnnnnnnnnnnnnnnnnnnnnnnnnnnnnnnnnnnnnnnnnnnnnnnnnnnnnnnnnnnnnnnnnnnnnnnnnnnnnnnnnnnnnnnnnnnnnnnnnnnnnnnnnnnnnnnnnnnnnnnnnnnnnnnnnnnnnnnnnnnnnnnnnnnnnnnnnnnnnnnnnnnnnnnnnnnnnnnnnnnnnnnnnnnnnnnnnnnnnnnnnnnnnnnnnnnnnnnnnnnnnnnnnnnnnnnnnnnnnnnnnnnnnnnnnnnnnnnnnnnnnnnnnnnnnnnnnnnnnnnnnnnnnnnnnnnnnnnnnnnnnnnnnnnnnnnnnnnnnnnnnnnnnnnnnnnnnnnnnnnnnnnnnnnnnnnnnnnnnnnnnnnnnnnnnnnnnnnnnnnnnnnnnnnnnnnnnnnnnnnnnnnnnnnnnnnnnnnnnnnnnnnnnnnnnnnnnnnnnnnnnnnnnnnnnnnnnnnnnnnnnnnnnnnnnnnnnnnnnnnnnnnnnnnnnnnnnnnnnnnnnnnnnnnnnnnnnnnnnnnnnnnnnnnnnnnnnnnnnnnnnnnnnnnnnnnnnnnnnnnnnnnnnnnnnnnnnnnnnnnnnnnnnnnnnnnnnnnnnnnnnnnnnnnnnnnnnnnnnnnnnnnnnnnnnnnnnnnnnnnnnnnnnnnnnnnnnnnnnnnnnnnnnnnnnnnnnnnnnnnnnnnnnnnnnnnnnnnnnnnnnnnnnnnnnnnnnnnnnnnnnnnnnnnnnnnnnnnnnnnnnnnnnnnnnnnnnnnnnnnnnnnnnnnnnnnnnnnnnnnnnnnnnnnnnnnnnnnnnnnnnnnnnnnnnnnnnnnnnnnnnnnnnnnnnnnnnnnnnnnnnnnnnnnnnnnnnnnnnnnnnnnnnnnnnnnnnnnnnnnnnnnnnnnnnnnnnnnnnnnnnnnnnnnnnnnnnnnnnnnnnnnnnnnnnnnnnnnnnnnnnnnnnnnnnnnnnnnnnnnnnnnnnnnnnnnnnnnnnnnnnnnnnnnnnnnnnnnnnnnnnnnnnnnnnnnnnnnnnnnnnnnnnnnnnnnnnnnnnnnnnnnnnnnnnnnnnnnnnnnnnnnnnnnnnnnnnnnnnnnnnnnnnnnnnnnnnnnnnnnnnnnnnnnnnnnnnnnnnnnnnnnnnnnnnnnnnnnnnnnnnnnnnnnnnnnnnnnnnnnnnnnnnnnnnnnnnnnnnnnnnnnnnnnnnnnnnnnnnnnnnnnnnnnnnnnnnnnnnnnnnnnnnnnnnnnnnnnnnnnnnnnnnnnnnnnnnnnnnnnnnnnnnnnnnnnnnnnnnnnnnnnnnnnnnnnnnnnnnnnnnnnnnnnnnnnnnnnnnnnnnnnnnnnnnnnnnnnnnnnnnnnnnnnnnnnnnnnnnnnnnnnnnnnnnnnnnnnnnnnnnnnnnnnnnnnnnnnnnnnnnnnnnnnnnnnnnnnnnnnnnnnnnnnnnnnnnnnnnnnnnnnnnnnnnnnnnnnnnnnnnnnnnnnnnnnnnnnnnnnnnnnnnnnnnnnnnnnnnnnnnnnnnnnnnnnnnnnnnnnnnnnnnnnnnnnnnnnnnnnnnnnnnnnnnnnnnnnnnnnnnnnnnnnnnnnnnnnnnnnnnnnnnnnnnnnnnnnnnnnnnnnnnnnnnnnnnnnnnnnnnnnnnnnnnnnnnnnnnnnnnnnnnnnnnnnnnnnnnnnnnnnnnnnnnnnnnnnnnnnnnnnnnnnnnnnnnnnnnnnnnnnnnnnnnnnnnnnnnnnnnnnnnnnnnnnnnnnnnnnnnnnnnnnnnnnnnnnnnnnnnnnnnnnnnnnnnnnnnnnnnnnnnnnnnnnnnnnnnnnnnnnnnnnnnnnnnnnnnnnnnnnnnnnnnnnnnnnnnnnnnnnnnnnnnnnnnnnnnnnnnnnnnnnnnnnnnnnnnnnnnnnnnnnnnnnnnnnnnnnnnnnnnnnnnnnnnnnnnnnnnnnnnnnnnnnnnnnnnnnnnnnnnnnnnnnnnnnnnnnnnnnnnnnnnnnnnnnnnnnnnnnnnnnnnnnnnnnnnnnnnnnnnnnnnnnnnnnnnnnnnnnnnnnnnnnnnnnnnnnnnnnnnnnnnnnnnnnnnnnnnnnnnnnnnnnnnnnnnnnnnnnnnnnnnnnnnnnnnnnnnnnnnnnnnnnnnnnnnnnnnnnnnnnnnnnnnnnnnnnnnnnnnnnnnnnnnnnnnnnnnnnnnnnnnnnnnnnnnnnnnnnnnnnnnnnnnnnnnnnnnnnnnnnnnnnnnnnnnnnnnnnnnnnnnnnnnnnnnnnnnnnnnnnnnnnnnnnnnnnnnnnnnnnnnnnnnnnnnnnnnnnnnnnnnnnnnnnnnnnnnnnnnnnnnnnnnnnnnnnnnnnnnnnnnnnnnnnnnnnnnnnnnnnnnnnnnnnnnnnnnnnnnnnnnnnnnnnnnnnnnnnnnnnnnnnnnnnnnnnnnnnnnnnnnnnnnnnnnnnnnnnnnnnnnnnnnnnnnnnnnnnnnnnnnnnnnnnnnnnnnnnnnnnnnnnnnnnnnnnnnnnnnnnnnnnnnnnnnnnnnnnnnnnnnnnnnnnnnnnnnnnnnnnnnnnnnnnnnnnnnnnnnnnnnnnnnnnnnnnnnnnnnnnnnnnnnnnnnnnnnnnnnnnnnnnnnnnnnnnnnnnnnnnnnnnnnnnnnnnnnnnnnnnnnnnnnnnnnnnnnnnnnnnnnnnnnnnnnnnnnnnnnnnnnnnnnnnnnnnnnnnnnnnnnnnnnnnnnnnnnnnnnnnnnnnnnnnnnnnnnnnnnnnnnnnnnnnnnnnnnnnnnnnnnnnnnnnnnnnnnnnnnnnnnnnnnnnnnnnnnnnnnnnnnnnnnnnnnnnnnnnnnnnnnnnnnnnnnnnnnnnnnnnnnnnnnnnnnnnnnnnnnnnnnnnnnnnnnnnnnnnnnnnnnnnnnnnnnnnnnnnnnnnnnnnnnnnnnnnnnnnnnnnnnnnnnnnnnnnnnnnnnnnnnnnnnnnnnnnnnnnnnnnnnnnnnnnnnnnnnnnnnnnnnnnnnnnnnnnnnnnnnnnnnnnnnnnnnnnnnnnnnnnnnnnnnnnnnnnnnnnnnnnnnnnnnnnnnnnnnnnnnnnnnnnnnnnnnnnnnnnnnnnnnnnnnnnnnnnnnnnnnnnnnnnnnnnnnnnnnnnnnnnnnnnnnnnnnnnnnnnnnnnnnnnnnnnnnnnnnnnnnnnnnnnnnnnnnnnnnnnnnnnnnnnnnnnnnnnnnnnnnnnnnnnnnnnnnnnnnnnnnnnnnnnnnnnnnnnnnnnnnnnnnnnnnnnnnnnnnnnnnnnnnnnnnnnnnnnnnnnnnnnnnnnnnnnnnnnnnnnnnnnnnnnnnnnnnnnnnnnnnnnnnnnnnnnnnnnnnnnnnnnnnnnnnnnnnnnnnnnnnnnnnnnnnnnnnnnnnnnnnnnnnnnnnnnnnnnnnnnnnnnnnnnnnnnnnnnnnnnnnnnnnnnnnnnnnnnnnnnnnnnnnnnnnnnnnnnnnnnnnnnnnnnnnnnnnnnnnnnnnnnnnnnnnnnnnnnnnnnnnnnnnnnnnnnnnnnnnnnnnnnnnnnnnnnnnnnnnnnnnnnnnnnnnnnnnnnnnnnnnnnnnnnnnnnnnnnnnnnnnnnnnnnnnnnnnnnnnnnnnnnnnnnnnnnnnnnnnnnnnnnnnnnnnnnnnnnnnnnnnnnnnnnnnnnnnnnnnnnnnnnnnnnnnnnnnnnnnnnnnnnnnnnnnnnnnnnnnnnnnnnnnnnnnnnnnnnnnnnnnnnnnnnnnnnnnnnnnnnnnnnnnnnnnnnnnnnnnnnnnnnnnnnnnnnnnnnnnnnnnnnnnnnnnnnnnnnnnnnnnnnnnnnnnnnnnnnnnnnnnnnnnnnnnnnnnnnnnnnnnnnnnnnnnnnnnnnnnnnnnnnnnnnnnnnnnnnnnnnnnnnnnnnnnnnnnnnnnnnnnnnnnnnnnnnnnnnnnnnnnnnnnnnnnnnnnnnnnnnnnnnnnnnnnnnnnnnnnnnnnnnnnnnnnnnnnnnnnnnnnnnnnnnnnnnnnnnnnnnnnnnnnnnnnnnnnnnnnnnnnnnnnnnnnnnnnnnnnnnnnnnnnnnnnnnnnnnnnnnnnnnnnnnnnnnnnnnnnnnnnnnnnnnnnnnnnnnnnnnnnnnnnnnnnnnnnnnnnnnnnnnnnnnnnnnnnnnnnnnnnnnnnnnnnnnnnnnnnnnnnnnnnnnnnnnnnnnnnnnnnnnnnnnnnnnnnnnnnnnnnnnnnnnnnnnnnnnnnnnnnnnnnnnnnnnnnnnnnnnnnnnnnnnnnnnnnnnnnnnnnnnnnnnnnnnnnnnnnnnnnnnnnnnnnnnnnnnnnnnnnnnnnnnnnnnnnnnnnnnnnnnnnnnnnnnnnnnnnnnnnnnnnnnnnnnnnnnnnnnnnnnnnnnnnnnnnnnnnnnnnnnnnnnnnnnnnnnnnnnnnnnnnnnnnnnnnnnnnnnnnnnnnnnnnnnnnnnnnnnnnnnnnnnnnnnnnnnnnnnnnnnnnnnnnnnnnnnnnnnnnnnnnnnnnnnnnnnnnnnnnnnnnnnnnnnnnnnnnnnnnnnnnnnnnnnnnnnnnnnnnnnnnnnnnnnnnnnnnnnnnnnnnnnnnnnnnnnnnnnnnnnnnnnnnnnnnnnnnnnnnnnnnnnnnnnnnnnnnnnnnnnnnnnnnnnnnnnnnnnnnnnnnnnnnnnnnnnnnnnnnnnnnnnnnnnnnnnnnnnnnnnnnnnnnnnnnnnnnnnnnnnnnnnnnnnnnnnnnnnnnnnnnnnnnnnnnnnnnnnnnnnnnnnnnnnnnnnnnnnnnnnnnnnnnnnnnnnnnnnnnnnnnnnnnnnnnnnnnnnnnnnnnnnnnnnnnnnnnnnnnnnnnnnnnnnnnnnnnnnnnnnnnnnnnnnnnnnnnnnnnnnnnnnnnnnnnnnnnnnnnnnnnnnnnnnnnnnnnnnnnnnnnnnnnnnnnnnnnnnnnnnnnnnnnnnnnnnnnnnnnnnnnnnnnnnnnnnnnnnnnnnnnnnnnnnnnnnnnnnnnnnnnnnnnnnnnnnnnnnnnnnnnnnnnnnnnnnnnnnnnnnnnnnnnnnnnnnnnnnnnnnnnnnnnnnnnnnnnnnnnnnnnnnnnnnnnnnnnnnnnnnnnnnnnnnnnnnnnnnnnnnnnnnnnnnnnnnnnnnnnnnnnnnnnnnnnnnnnnnnnnnnnnnnnnnnnnnnnnnnnnnnnnnnnnnnnnnnnnnnnnnnnnnnnnnnnnnnnnnnnnnnnnnnnnnnnnnnnnnnnnnnnnnnnnnnnnnnnnnnnnnnnnnnnnnnnnnnnnnnnnnnnnnnnnnnnnnnnnnnnnnnnnnnnnnnnnnnnnnnnnnnnnnnnnnnnnnnnnnnnnnnnnnnnnnnnnnnnnnnnnnnnnnnnnnnnnnnnnnnnnnnnnnnnnnnnnnnnnnnnnnnnnnnnnnnnnnnnnnnnnnnnnnnnnnnnnnnnnnnnnnnnnnnnnnnnnnnnnnnnnnnnnnnnnnnnnnnnnnnnnnnnnnnnnnnnnnnnnnnnnnnnnnnnnnnnnnnnnnnnnnnnnnnnnnnnnnnnnnnnnnnnnnnnnnnnnnnnnnnnnnnnnnnnnnnnnnnnnnnnnnnnnnnnnnnnnnnnnnnnnnnnnnnnnnnnnnnnnnnnnnnnnnnnnnnnnnnnnnnnnnnnnnnnnnnnnnnnnnnnnnnnnnnnnnnnnnnnnnnnnnnnnnnnnnnnnnnnnnnnnnnnnnnnnnnnnnnnnnnnnnnnnnnnnnnnnnnnnnnnnnnnnnnnnnnnnnnnnnnnnnnnnnnnnnnnnnnnnnnnnnnnnnnnnnnnnnnnnnnnnnnnnnnnnnnnnnnnnnnnnnnnnnnnnnnnnnnnnnnnnnnnnnnnnnnnnnnnnnnnnnnnnnnnnnnnnnnnnnnnnnnnnnnnnnnnnnnnnnnnnnnnnnnnnnnnnnnnnnnnnnnnnnnnnnnnnnnnnnnnnnnnnnnnnnnnnnnnnnnnnnnnnnnnnnnnnnnnnnnnnnnnnnnnnnnnnnnnnnnnnnnnnnnnnnnnnnnnnnnnnnnnnnnnnnnnnnnnnnnnnnnnnnnnnnnnnnnnnnnnnnnnnnnnnnnnnnnnnnnnnnnnnnnnnnnnnnnnnnnnnnnnnnnnnnnnnnnnnnnnnnnnnnnnnnnnnnnnnnnnnnnnnnnnnnnnnnnnnnnnnnnnnnnnnnnnnnnnnnnnnnnnnnnnnnnnnnnnnnnnnnnnnnnnnnnnnnnnnnnnnnnnnnnnnnnnnnnnnnnnnnnnnnnnnnnnnnnnnnnnnnnnnnnnnnnnnnnnnnnnnnnnnnnnnnnnnnnnnnnnnnnnnnnnnnnnnnnnnnnnnnnnnnnnnnnnnnnnnnnnnnnnnnnnnnnnnnnnnnnnnnnnnnnnnnnnnnnnnnnnnnnnnnnnnnnnnnnnnnnnnnnnnnnnnnnnnnnnnnnnnnnnnnnnnnnnnnnnnnnnnnnnnnnnnnnnnnnnnnnnnnnnnnnnnnnnnnnnnnnnnnnnnnnnnnnnnnnnnnnnnnnnnnnnnnnnnnnnnnnnnnnnnnnnnnnnnnnnnnnnnnnnnnnnnnnnnnnnnnnnnnnnnnnnnnnnnnnnnnnnnnnnnnnnnnnnnnnnnnnnnnnnnnnnnnnnnnnnnnnnnnnnnnnnnnnnnnnnnnnnnnnnnnnnnnnnnnnnnnnnnnnnnnnnnnnnnnnnnnnnnnnnnnnnnnnnnnnnnnnnnnnnnnnnnnnnnnnnnnnnnnnnnnnnnnnnnnnnnnnnnnnnnnnnnnnnnnnnnnnnnnnnnnnnnnnnnnnnnnnnnnnnnnnnnnnnnnnnnnnnnnnnnnnnnnnnnnnnnnnnnnnnnnnnnnnnnnnnnnnnnnnnnnnnnnnnnnnnnnnnnnnnnnnnnnnnnnnnnnnnnnnnnnnnnnnnnnnnnnnnnnnnnnnnnnnnnnnnnnnnnnnnnnnnnnnnnnnnnnnnnnnnnnnnnnnnnnnnnnnnnnnnnnnnnnnnnnnnnnnnnnnnnnnnnnnnnnnnnnnnnnnnnnnnnnnnnnnnnnnnnnnnnnnnnnnnnnnnnnnnnnnnnnnnnnnnnnnnnnnnnnnnnnnnnnnnnnnnnnnnnnnnnnnnnnnnnnnnnnnnnnnnnnnnnnnnnnnnnnnnnnnnnnnnnnnnnnnnnnnnnnnnnnnnnnnnnnnnnnnnnnnnnnnnnnnnnnnnnnnnnnnnnnnnnnnnnnnnnnnnnnnnnnnnnnnnnnnnnnnnnnnnnnnnnnnnnnnnnnnnnnnnnnnnnnnnnnnnnnnnnnnnnnnnnnnnnnnnnnnnnnnnnnnnnnnnnnnnnnnnnnnnnnnnnnnnnnnnnnnnnnnnnnnnnnnnnnnnnnnnnnnnnnnnnnnnnnnnnnnnnnnnnnnnnnnnnnnnnnnnnnnnnnnnnnnnnnnnnnnnnnnnnnnnnnnnnnnnnnnnnnnnnnnnnnnnnnnnnnnnnnnnnnnnnnnnnnnnnnnnnnnnnnnnnnnnnnnnnnnnnnnnnnnnnnnnnnnnnnnnnnnnnnnnnnnnnnnnnnnnnnnnnnnnnnnnnnnnnnnnnnnnnnnnnnnnnnnnnnnnnnnnnnnnnnnnnnnnnnnnnnnnnnnnnnnnnnnnnnnnnnnnnnnnnnnnnnnnnnnnnnnnnnnnnnnnnnnnnnnnnnnnnnnnnnnnnnnnnnnnnnnnnnnnnnnnnnnnnnnnnnnnnnnnnnnnnnnnnnnnnnnnnnnnnnnnnnnnnnnnnnnnnnnnnnnnnnnnnnnnnnnnnnnnnnnnnnnnnnnnnnnnnnnnnnnnnnnnnnnnnnnnnnnnnnnnnnnnnnnnnnnnnnnnnnnnnnnnnnnnnnnnnnnnnnnnnnnnnnnnnnnnnnnnnnnnnnnnnnnnnnnnnnnnnnnnnnnnnnnnnnnnnnnnnnnnnnnnnnnnnnnnnnnnnnnnnnnnnnnnnnnnnnnnnnnnnnnnnnnnnnnnnnnnnnnnnnnnnnnnnnnnnnnnnnnnnnnnnnnnnnnnnnnnnnnnnnnnnnnnnnnnnnnnnnnnnnnnnnnnnnnnnnnnnnnnnnnnnnnnnnnnnnnnnnnnnnnnnnnnnnnnnnnnnnnnnnnnnnnnnnnnnnnnnnnnnnnnnnnnnnnnnnnnnnnnnnnnnnnnnnnnnnnnnnnnnnnnnnnnnnnnnnnnnnnnnnnnnnnnnnnnnnnnnnnnnnnnnnnnnnnnnnnnnnnnnnnnnnnnnnnnnnnnnnnnnnnnnnnnnnnnnnnnnnnnnnnnnnnnnnnnnnnnnnnnnnnnnnnnnnnnnnnnnnnnnnnnnnnnnnnnnnnnnnnnnnnnnnnnnnnnnnnnnnnnnnnnnnnnnnnnnnnnnnnnnnnnnnnnnnnnnnnnnnnnnnnnnnnnnnnnnnnnnnnnnnnnnnnnnnnnnnnnnnnnnnnnnnnnnnnnnnnnnnnnnnnnnnnnnnnnnnnnnnnnnnnnnnnnnnnnnnnnnnnnnnnnnnnnnnnnnnnnnnnnnnnnnnnnnnnnnnnnnnnnnnnnnnnnnnnnnnnnnnnnnnnnnnnnnnnnnnnnnnnnnnnnnnnnnnnnnnnnnnnnnnnnnnnnnnnnnnnnnnnnnnnnnnnnnnnnnnnnnnnnnnnnnnnnnnnnnnnnnnnnnnnnnnnnnnnnnnnnnnnnnnnnnnnnnnnnnnnnnnnnnnnnnnnnnnnnnnnnnnnnnnnnnnnnnnnnnnnnnnnnnnnnnnnnnnnnnnnnnnnnnnnnnnnnnnnnnnnnnnnnnnnnnnnnnnnnnnnnnnnnnnnnnnnnnnnnnnnnnnnnnnnnnnnnnnnnnnnnnnnnnnnnnnnnnnnnnnnnnnnnnnnnnnnnnnnnnnnnnnnnnnnnnnnnnnnnnnnnnnnnnnnnnnnnnnnnnnnnnnnnnnnnnnnnnnnnnnnnnnnnnnnnnnnnnnnnnnnnnnnnnnnnnnnnnnnnnnnnnnnnnnnnnnnnnnnnnnnnnnnnnnnnnnnnnnnnnnnnnnnnnnnnnnnnnnnnnnnnnnnnnnnnnnnnnnnnnnnnnnnnnnnnnnnnnnnnnnnnnnnnnnnnnnnnnnnnnnnnnnnnnnnnnnnnnnnnnnnnnnnnnnnnnnnnnnnnnnnnnnnnnnnnnnnnnnnnnnnnnnnnnnnnnnnnnnnnnnnnnnnnnnnnnnnnnnnnnnnnnnnnnnnnnnnnnnnnnnnnnnnnnnnnnnnnnnnnnnnnnnnnnnnnnnnnnnnnnnnnnnnnnnnnnnnnnnnnnnnnnnnnnnnnnnnnnnnnnnnnnnnnnnnnnnnnnnnnnnnnnnnnnnnnnnnnnnnnnnnnnnnnnnnnnnnnnnnnnnnnnnnnnnnnnnnnnnnnnnnnnnnnnnnnnnnnnnnnnnnnnnnnnnnnnnnnnnnnnnnnnnnnnnnnnnnnnnnnnnnnnnnnnnnnnnnnnnnnnnnnnnnnnnnnnnnnnnnnnnnnnnnnnnnnnnnnnnnnnnnnnnnnnnnnnnnnnnnnnnnnnnnnnnnnnnnnnnnnnnnnnnnnnnnnnnnnnnnnnnnnnnnnnnnnnnnnnnnnnnnnnnnnnnnnnnnnnnnnnnnnnnnnnnnnnnnnnnnnnnnnnnnnnnnnnnnnnnnnnnnnnnnnnnnnnnnnnnnnnnnnnnnnnnnnnnnnnnnnnnnnnnnnnnnnnnnnnnnnnnnnnnnnnnnnnnnnnnnnnnnnnnnnnnnnnnnnnnnnnnnnnnnnnnnnnnnnnnnnnnnnnnnnnnnnnnnnnnnnnnnnnnnnnnnnnnnnnnnnnnnnnnnnnnnnnnnnnnnnnnnnnnnnnnnnnnnnnnnnnnnnnnnnnnnnnnnnnnnnnnnnnnnnnnnnnnnnnnnnnnnnnnnnnnnnnnnnnnnnnnnnnnnnnnnnnnnnnnnnnnnnnnnnnnnnnnnnnnnnnnnnnnnnnnnnnnnnnnnnnnnnnnnnnnnnnnnnnnnnnnnnnnnnnnnnnnnnnnnnnnnnnnnnnnnnnnnnnnnnnnnnnnnnnnnnnnnnnnnnnnnnnnnnnnnnnnnnnnnnnnnnnnnnnnnnnnnnnnnnnnnnnnnnnnnnnnnnnnnnnnnnnnnnnnnnnnnnnnnnnnnnnnnnnnnnnnnnnnnnnnnnnnnnnnnnnnnnnnnnnnnnnnnnnnnnnnnnnnnnnnnnnnnnnnnnnnnnnnnnnnnnnnnnnnnnnnnnnnnnnnnnnnnnnnnnnnnnnnnnnnnnnnnnnnnnnnnnnnnnnnnnnnnnnnnnnnnnnnnnnnnnnnnnnnnnnnnnnnnnnnnnnnnnnnnnnnnnnnnnnnnnnnnnnnnnnnnnnnnnnnnnnnnnnnnnnnnnnnnnnnnnnnnnnnnnnnnnnnnnnnnnnnnnnnnnnnnnnnnnnnnnnnnnnnnnnnnnnnnnnnnnnnnnnnnnnnnnnnnnnnnnnnnnnnnnnnnnnnnnnnnnnnnnnnnnnnnnnnnnnnnnnnnnnnnnnnnnnnnnnnnnnnnnnnnnnnnnnnnnnnnnnnnnnnnnnnnnnnnnnnnnnnnnnnnnnnnnnnnnnnnnnnnnnnnnnnnnnnnnnnnnnnnnnnnnnnnnnnnnnnnnnnnnnnnnnnnnnnnnnnnnnnnnnnnnnnnnnnnnnnnnnnnnnnnnnnnnnnnnnnnnnnnnnnnnnnnnnnnnnnnnnnnnnnnnnnnnnnnnnnnnnnnnnnnnnnnnnnnnnnnnnnnnnnnnnnnnnnnnnnnnnnnnnnnnnnnnnnnnnnnnnnnnnnnnnnnnnnnnnnnnnnnnnnnnnnnnnnnnnnnnnnnnnnnnnnnnnnnnnnnnnnnnnnnnnnnnnnnnnnnnnnnnnnnnnnnnnnnnnnnnnnnnnnnnnnnnnnnnnnnnnnnnnnnnnnnnnnnnnnnnnnnnnnnnnnnnnnnnnnnnnnnnnnnnnnnnnnnnnnnnnnnnnnnnnnnnnnnnnnnnnnnnnnnnnnnnnnnnnnnnnnnnnnnnnnnnnnnnnnnnnnnnnnnnnnnnnnnnnnnnnnnnnnnnnnnnnnnnnnnnnnnnnnnnnnnnnnnnnnnnnnnnnnnnnnnnnnnnnnnnnnnnnnnnnnnnnnnnnnnnnnnnnnnnnnnnnnnnnnnnnnnnnnnnnnnnnnnnnnnnnnnnnnnnnnnnnnnnnnnnnnnnnnnnnnnnnnnnnnnnnnnnnnnnnnnnnnnnnnnnnnnnnnnnnnnnnnnnnnnnnnnnnnnnnnnnnnnnnnnnnnnnnnnnnnnnnnnnnnnnnnnnnnnnnnnnnnnnnnnnnnnnnnnnnnnnnnnnnnnnnnnnnnnnnnnnnnnnnnnnnnnnnnnnnnnnnnnnnnnnnnnnnnnnnnnnnnnnnnnnnnnnnnnnnnnnnnnnnnnnnnnnnnnnnnnnnnnnnnnnnnnnnnnnnnnnnnnnnnnnnnnnnnnnnnnnnnnnnnnnnnnnnnnnnnnnnnnnnnnnnnnnnnnnnnnnnnnnnnnnnnnnnnnnnnnnnnnnnnnnnnnnnnnnnnnnnnnnnnnnnnnnnnnnnnnnnnnnnnnnnnnnnnnnnnnnnnnnnnnnnnnnnnnnnnnnnnnnnnnnnnnnnnnnnnnnnnnnnnnnnnnnnnnnnnnnnnnnnnnnnnnnnnnnnnnnnnnnnnnnnnnnnnnnnnnnnnnnnnnnnnnnnnnnnnnnnnnnnnnnnnnnnnnnnnnnnnnnnnnnnnnnnnnnnnnnnnnnnnnnnnnnnnnnnnnnnnnnnnnnnnnnnnnnnnnnnnnnnnnnnnnnnnnnnnnnnnnnnnnnnnnnnnnnnnnnnnnnnnnnnnnnnnnnnnnnnnnnnnnnnnnnnnnnnnnnnnnnnnnnnnnnnnnnnnnnnnnnnnnnnnnnnnnnnnnnnnnnnnnnnnnnnnnnnnnnnnnnnnnnnnnnnnnnnnnnnnnnnnnnnnnnnnnnnnnnnnnnnnnnnnnnnnnnnnnnnnnnnnnnnnnnnnnnnnnnnnnnnnnnnnnnnnnnnnnnnnnnnnnnnnnnnnnnnnnnnnnnnnnnnnnnnnnnnnnnnnnnnnnnnnnnnnnnnnnnnnnnnnnnnnnnnnnnnnnnnnnnnnnnnnnnnnnnnnnnnnnnnnnnnnnnnnnnnnnnnnnnnnnnnnnnnnnnnnnnnnnnnnnnnnnnnnnnnnnnnnnnnnnnnnnnnnnnnnnnnnnnnnnnnnnnnnnnnnnnnnnnnnnnnnnnnnnnnnnnnnnnnnnnnnnnnnnnnnnnnnnnnnnnnnnnnnnnnnnnnnnnnnnnnnnnnnnnnnnnnnnnnnnnnnnnnnnnnnnnnnnnnnnnnnnnnnnnnnnnnnnnnnnnnnnnnnnnnnnnnnnnnnnnnnnnnnnnnnnnnnnnnnnnnnnnnnnnnnnnnnnnnnnnnnnnnnnnnnnnnnnnnnnnnnnnnnnnnnnnnnnnnnnnnnnnnnnnnnnnnnnnnnnnnnnnnnnnnnnnnnnnnnnnnnnnnnnnnnnnnnnnnnnnnnnnnnnnnnnnnnnnnnnnnnnnnnnnnnnnnnnnnnnnnnnnnnnnnnnnnnnnnnnnnnnnnnnnnnnnnnnnnnnnnnnnnnnnnnnnnnnnnnnnnnnnnnnnnnnnnnnnnnnnnnnnnnnnnnnnnnnnnnnnnnnnnnnnnnnnnnnnnnnnnnnnnnnnnnnnnnnnnnnnnnnnnnnnnnnnnnnnnnnnnnnnnnnnnnnnnnnnnnnnnnnnnnnnnnnnnnnnnnnnnnnnnnnnnnnnnnnnnnnnnnnnnnnnnnnnnnnnnnnnnnnnnnnnnnnnnnnnnnnnnnnnnnnnnnnnnnnnnnnnnnnnnnnnnnnnnnnnnnnnnnnnnnnnnnnnnnnnnnnnnnnnnnnnnnnnnnnnnnnnnnnnnnnnnnnnnnnnnnnnnnnnnnnnnnnnnnnnnnnnnnnnnnnnnnnnnnnnnnnnnnnnnnnnnnnnnnnnnnnnnnnnnnnnnnnnnnnnnnnnnnnnnnnnnnnnnnnnnnnnnnnnnnnnnnnnnnnnnnnnnnnnnnnnnnnnnnnnnnnnnnnnnnnnnnnnnnnnnnnnnnnnnnnnnnnnnnnnnnnnnnnnnnnnnnnnnnnnnnnnnnnnnnnnnnnnnnnnnnnnnnnnnnnnnnnnnnnnnnnnnnnnnnnnnnnnnnnnnnnnnnnnnnnnnnnnnnnnnnnnnnnnnnnnnnnnnnnnnnnnnnnnnnnnnnnnnnnnnnnnnnnnnnnnnnnnnnnnnnnnnnnnnnnnnnnnnnnnnnnnnnnnnnnnnnnnnnnnnnnnnnnnnnnnnnnnnnnnnnnnnnnnnnnnnnnnnnnnnnnnnnnnnnnnnnnnnnnnnnnnnnnnnnnnnnnnnnnnnnnnnnnnnnnnnnnnnnnnnnnnnnnnnnnnnnnnnnnnnnnnnnnnnnnnnnnnnnnnnnnnnnnnnnnnnnnnnnnnnnnnnnnnnnnnnnnnnnnnnnnnnnnnnnnnnnnnnnnnnnnnnnnnnnnnnnnnnnnnnnnnnnnnnnnnnnnnnnnnnnnnnnnnnnnnnnnnnnnnnnnnnnnnnnnnnnnnnnnnnnnnnnnnnnnnnnnnnnnnnnnnnnnnnnnnnnnnnnnnnnnnnnnnnnnnnnnnnnnnnnnnnnnnnnnnnnnnnnnnnnnnnnnnnnnnnnnnnnnnnnnnnnnnnnnnnnnnnnnnnnnnnnnnnnnnnnnnnnnnnnnnnnnnnnnnnnnnnnnnnnnnnnnnnnnnnnnnnnnnnnnnnnnnnnnnnnnnnnnnnnnnnnnnnnnnnnnnnnnnnnnnnnnnnnnnnnnnnnnnnnnnnnnnnnnnnnnnnnnnnnnnnnnnnnnnnnnnnnnnnnnnnnnnnnnnnnnnnnnnnnnnnnnnnnnnnnnnnnnnnnnnnnnnnnnnnnnnnnnnnnnnnnnnnnnnnnnnnnnnnnnnnnnnnnnnnnnnnnnnnnnnnnnnnnnnnnnnnnnnnnnnnnnnnnnnnnnnnnnnnnnnnnnnnnnnnnnnnnnnnnnnnnnnnnnnnnnnnnnnnnnnnnnnnnnnnnnnnnnnnnnnnnnnnnnnnnnnnnnnnnnnnnnnnnnnnnnnnnnnnnnnnnnnnnnnnnnnnnnnnnnnnnnnnnnnnnnnnnnnnnnnnnnnnnnnnnnnnnnnnnnnnnnnnnnnnnnnnnnnnnnnnnnnnnnnnnnnnnnnnnnnnnnnnnnnnnnnnnnnnnnnnnnnnnnnnnnnnnnnnnnnnnnnnnnnnnnnnnnnnnnnnnnnnnnnnnnnnnnnnnnnnnnnnnnnnnnnnnnnnnnnnnnnnnnnnnnnnnnnnnnnnnnnnnnnnnnnnnnnnnnnnnnnnnnnnnnnnnnnnnnnnnnnnnnnnnnnnnnnnnnnnnnnnnnnnnnnnnnnnnnnnnnnnnnnnnnnnnnnnnnnnnnnnnnnnnnnnnnnnnnnnnnnnnnnnnnnnnnnnnnnnnnnnnnnnnnnnnnnnnnnnnnnnnnnnnnnnnnnnnnnnnnnnnnnnnnnnnnnnnnnnnnnnnnnnnnnnnnnnnnnnnnnnnnnnnnnnnnnnnnnnnnnnnnnnnnnnnnnnnnnnnnnnnnnnnnnnnnnnnnnnnnnnnnnnnnnnnnnnnnnnnnnnnnnnnnnnnnnnnnnnnnnnnnnnnnnnnnnnnnnnnnnnnnnnnnnnnnnnnnnnnnnnnnnnnnnnnnnnnnnnnnnnnnnnnnnnnnnnnnnnnnnnnnnnnnnnnnnnnnnnnnnnnnnnnnnnnnnnnnnnnnnnnnnnnnnnnnnnnnnnnnnnnnnnnnnnnnnnnnnnnnnnnnnnnnnnnnnnnnnnnnnnnnnnnnnnnnnnnnnnnnnnnnnnnnnnnnnnnnnnnnnnnnnnnnnnnnnnnnnnnnnnnnnnnnnnnnnnnnnnnnnnnnnnnnnnnnnnnnnnnnnnnnnnnnnnnnnnnnnnnnnnnnnnnnnnnnnnnnnnnnnnnnnnnnnnnnnnnnnnnnnnnnnnnnnnnnnnnnnnnnnnnnnnnnnnnnnnnnnnnnnnnnnnnnnnnnnnnnnnnnnnnnnnnnnnnnnnnnnnnnnnnnnnnnnnnnnnnnnnnnnnnnnnnnnnnnnnnnnnnnnnnnnnnnnnnnnnnnnnnnnnnnnnnnnnnnnnnnnnnnnnnnnnnnnnnnnnnnnnnnnnnnnnnnnnnnnnnnnnnnnnnnnnnnnnnnnnnnnnnnnnnnnnnnnnnnnnnnnnnnnnnnnnnnnnnnnnnnnnnnnnnnnnnnnnnnnnnnnnnnnnnnnnnnnnnnnnnnnnnnnnnnnnnnnnnnnnnnnnnnnnnnnnnnnnnnnnnnnnnnnnnnnnnnnnnnnnnnnnnnnnnnnnnnnnnnnnnnnnnnnnnnnnnnnnnnnnnnnnnnnnnnnnnnnnnnnnnnnnnnnnnnnnnnnnnnnnnnnnnnnnnnnnnnnnnnnnnnnnnnnnnnnnnnnnnnnnnnnnnnnnnnnnnnnnnnnnnnnnnnnnnnnnnnnnnnnnnnnnnnnnnnnnnnnnnnnnnnnnnnnnnnnnnnnnnnnnnnnnnnnnnnnnnnnnnnnnnnnnnnnnnnnnnnnnnnnnnnnnnnnnnnnnnnnnnnnnnnnnnnnnnnnnnnnnnnnnnnnnnnnnnnnnnnnnnnnnnnnnnnnnnnnnnnnnnnnnnnnnnnnnnnnnnnnnnnnnnnnnnnnnnnnnnnnnnnnnnnnnnnnnnnnnnnnnnnnnnnnnnnnnnnnnnnnnnnnnnnnnnnnnnnnnnnnnnnnnnnnnnnnnnnnnnnnnnnnnnnnnnnnnnnnnnnnnnnnnnnnnnnnnnnnnnnnnnnnnnnnnnnnnnnnnnnnnnnnnnnnnnnnnnnnnnnnnnnnnnnnnnnnnnnnnnnnnnnnnnnnnnnnnnnnnnnnnnnnnnnnnnnnnnnnnnnnnnnnnnnnnnnnnnnnnnnnnnnnnnnnnnnnnnnnnnnnnnnnnnnnnnnnnnnnnnnnnnnnnnnnnnnnnnnnnnnnnnnnnnnnnnnnnnnnnnnnnnnnnnnnnnnnnnnnnnnnnnnnnnnnnnnnnnnnnnnnnnnnnnnnnnnnnnnnnnnnnnnnnnnnnnnnnnnnnnnnnnnnnnnnnnnnnnnnnnnnnnnnnnnnnnnnnnnnnnnnnnnnnnnnnnnnnnnnnnnnnnnnnnnnnnnnnnnnnnnnnnnnnnnnnnnnnnnnnnnnnnnnnnnnnnnnnnnnnnnnnnnnnnnnnnnnnnnnnnnnnnnnnnnnnnnnnnnnnnnnnnnnnnnnnnnnnnnnnnnnnnnnnnnnnnnnnnnnnnnnnnnnnnnnnnnnnnnnnnnnnnnnnnnnnnnnnnnnnnnnnnnnnnnnnnnnnnnnnnnnnnnnnnnnnnnnnnnnnnnnnnnnnnnnnnnnnnnnnnnnnnnnnnnnnnnnnnnnnnnnnnnnnnnnnnnnnnnnnnnnnnnnnnnnnnnnnnnnnnnnnnnnnnnnnnnnnnnnnnnnnnnnnnnnnnnnnnnnnnnnnnnnnnnnnnnnntgtgtgtgtgtgtttgtgtgtgttgggggtatataaggtgtgtgtgtgtgtttgtgtgtgttgggggtatataaggtgtgtgtgtgtgtgttggggggtacataaggtgtgtgtgtgttgggggggtacctaaggtgtgggggggagggcacataaggtgtgggcattggcttctgcaaacagcctccaaatagtgacagtaggccctgctctgcccccactctctggctgccagaccctgcccaacagaagggggcacctcatgggaaggtgggtgatctctgaaccccctaccgccttcctccaggcatcggcaggagcactcggttctgtcgccttctctgcttttccatccctgcccacccgacagaccctccctgagcacgrccctcgctccaggctggggctggggtgatgtgaggcagcggaggtcataacagacacatgaacgaagggccacaggaatggggatgtcgtcgtggactctggcccctgggaagcatcaaggaaggcctcccagaggaggtgacatgagctgggcattgaggggccagcaggacgcctcctgggagaggtaagaggccctgggcacgcgggtggagggcggcagcagaagcgctggtgtggtgcatgtgtccggcctgtggccagggcaggtggacgacgaggccagatggggccggacgggagggcgctgaaggccaagttgaagccagccccgccttgggatggcgatgaggaaactgccctgatgcccaccgagagacagggtgggaggggcgagaccaccagcaccgccggggctcccgtgggggtccccaggaacctctcgtggggatccctagggacggcagcggccgccttcaccggggggaggaagtccccatgccggggggcagggccgggctgcggccccgctccagcttttctgagaccgcgggcaggatgtggcttccccagagttctaagtaaaggcagcaaacaccaacatccgagcgagtcccagggcaaaagattcggtggagtcttttctttaaatgaacattttaaagtaaagcaagaggattactccgtgaaagtttccacccacccaaaggcctcccacccgtcatgtgagggacaccgggttcccggtgttcaggccaagagggggccccgggaggccgcaggctggggagggacctttctcccaaggtcgaggaaggctctgggccctctgccccgggatggggggcccggctgggaagaggcgcgcggccccgtgggagcccaaagccgcggggtgtcgggccggggttccctccaggcgccccccccgcccggcaaaggcaggaatgtggccgacccgcagcccggcagccccgggaccgccaccccgaagggaggagacggcggctcgccgctcccgnnnnnnnnnnnnnnnnnnnnnnnnnnnnnnnnnnnnnnnnnnnnnnnnnnnnnnnnnnnnnnnnnnnnnnnnnnnnnnnnnnnnnnnnnnnnnnnnnnnnnnnnnnnnnnnnnnnnnnnnnnnnnnnnnnnnnnnnnnnnnnnnnnnnnnnnnnnnnnnnnnnnnnnnnnnnnnnnnnnnnnnnnnnnnnnnnnnnnnnnnnnnnnnnnnnnnnnnnnnnnnnnnnnnnnnnnnnnnnnnnnnnnnnnnnnnnnnnnnnnnnnnnnnnnnnnnnnnnnnnnnnnnnnnnnnnnnnnnnnnnnnnnnnnnnnnnnnnnnnnnnnnnnnnnnnnnnnnnnnnnnnnnnnnnnnnnnnnnnnnnnnnnnnnnnnnnnnnnnnnnnnnnnnnnnnnnnnnnnnnnnnnnnnnnnnnnnnnnnnnnnnnnnnnnnnnnnnnnnnnnnnnnnnnnnnnnnnnnnnnnnnnnnnnnnnnnnnnnnnnnnnnnnnnnnnnnnnnnnnnnnnnnnnnnnnnnnnnnnnnnnnnnnnnnnnnnnnnnnnnnnnnnnnnnnnnnnnnnnnnnnnnnnnnnnnnnnnnnnnnnnnnnnnnnnnnnnnnnnnnnnnnnnnnnnnnnnnnnnnnnnnnnnnnnnnnnnnnnnnnnnnnnnnnnnnnnnnnnnnnnnnnnnnnnnnnnnnnnnnnnnnnnnnnnnnnnnnnnnnnnnnnnnnnnnnnnnnnccgaggccgatccccgcgcgctggcggcaccgagcgccaaaggccccccagcccggggtctggcccccagcgcgctacaggtggacgcggggacccgctcgcgccggggccctgggggcgcgttgacccctcgccctgtcccagcgggacccgggaggcgctaacagcttccgagctcgcggtcgggggacccatcccgcagaggcctggggagccgcgcgaagccggcgagcaaacagctggaaattattaccagttaatgcgctccgtgtggccgcagccgcctgttggccccggaaggcgggccctggcgctcctgcccgtcccggaggagaggcctgtcctcgggggctccgcaggcgcgggtcacccctggtgctcagctggacaggctgtgtggccacgcaggacacgcggggcagagaccttctgcggctggcgcaggctcgtggacacgctcagcagggtgaccgcgggctgcgtctagggccaccggccgcccggtgggggccacggcttctccctcaccggggctaaccgctctgcccaccccacccccaggagaatcccttctgaaaaacagacagcacttctccccaccccttcggtttgacagcgaagccttatcctgagtgggaactcgtctccgtagctgcggggtgtaggactgggctgttgctcacgggtctccgaggtcagcagaaagtgcagagtccccacgccacctgcagccctccccgggggttctgatgggtattcagccgagggcctggagctgaagcctcacccagacctacaggacagctcaggagtcacaccctggacgtccctggctgagacagtggcagcccagtgcacatccttgtaaagataaaggatatttgtcctgcttgggccagacctgttaaactcagaaactcagagcaggtagatcttagagacccgctggccaagttccgtcctcttacctcccttagctgtcactttcatgtaaggaaacagagagggatttcacttgccccaagtcacacagctgatccgagacagcttgctgagaacagaaagtcggcatcatccctccacagaaggtaaaacctggcacgcgcctgtgtgctggcaggtggttcattcattcagggtctgcgggaagagattgcaaaatccacagtgcacggtcctggccaaatggtattgcaagtgttactgggaaggggtcccgatccaggccctcagagaggattcttggatcttgggcaagaaagaattcaggacgagtccatacagtgaaagcaagtttattaggaaagtaaaggaaaaaaagaatgcctactccttacagcagttccgagggctgctggttgcccatttttatggttatttcttgaggatatgctaaacaaggggtgggctattcatgcctccccgtttttagaccatatagggtaacttcccgacgttgctgtagcatttgtaaactctcagggcgctggtgggagtgtagcagtgaggaccaccagaggtcactctcatggccatcttggttttggtgggtttcggccggtttctttaccgcggcctgttttatcagcaaggtctttatgacctgtatcttgtgccgacctcctatctcatcctgtgacttagaatgccttcaccatctgggaatgcagccctgtaggtctcagcctcattttacccagctgctattcaagatggagtcactccgcttcacaggcctctgatgcagggacacagctgtacctcctacccctttggatcccaccatctgcacagcccaggtggcatcggaggaggagtctcagtgctttctggggttgtagaaagacggtttgttggcagtgggaggcctggactcactggagggaatttgccagccaagcatgaaagcctggttagattgggaaaggtgtctgggaagatggtggtcctgaggttgtcctctgggttcaggaagccagatctacttaaaggacttgccaaggtgccaccctggcactgaggagaggttcctgtcacccagtgtggcctccttcttttgtttttgtttttgtgtttttttgagactgagtctccctctgtcgcccaggctggagtgcagtggcgtgaccttggctcactgcaagctccacctcccgggttcacgtcattctcccgcctcagcctcccaagtagctgggcgcccgccaccacgcccggctaattttttgtatttttagtggagacagggtttcactgtgttagccaggatggtttcgatctcctgacatcgtgatccgcccacctcagccgcccaaagtggtgggattacagacgtgagccaccagcttttttttttttttagacagagtctcactctgtcacccaggctggagtgcagtggtgcaatcttggctgactgcaacctccgcctccttcaatctgggttgaactcctgggttcaagtgattcttctgcctcagcctccccagtagctgggactacagggtgtaccaccccacctggctattttgtatttcttgtagagatgaggttttgccatgttggccaagctggtcttgaactcctgacctcaagcaatccacccccgtccttggcctcccaaagtgctgagatgacaggagtgagccactgcacccggtcctcctcctttacagatttacagatatgctcagaactgacacacacaagaaatcagaggggcttggagagaatccagccccggcactgacactgacggagaagctgaggtagagaccccggtcccatatgcagattcccccaaaccgttcagccaccaccccaccaataagctgcaccaaacactgacaccccccatggctcccagagttctgttcagccaatcaattatgctgaggagggggccgggtgtggtggctcacacctgtcatcccagcactttgggaggccgaggcaggtggatcacctgaggtccggagttcgagaccagcctggccaacatggtgaaaccccgtctctactaaaaatacaaaaatttgccgggcgtggtggcgggcacttgtaatcccagctactcaggaggctgaggcaggagagttgcttgaacccaggaggtggatgttgcagtgagccgagatcgcgcccttgtctttaaagagctcaaagagaagcctaagccgactggaagagacatgaggtgaacccagggagcacccgtggcctggccgaggcttctccttgaactcctggtattccaacctgcccaggagtccttccgggtgggagagaaggcgattttctttctccttacataagagccatgcggctcagcccctggaagtcaggagtgtttccatagtcctgagcagtgagtccacacagctaatctgctttggattttcggaagggcctcgctactgggcccatcatcatcctgtgtcttatcttgatgttttccaaaggacattgcttaaagaaactcaaagcaaaccctgggaaaggcagcccattctaccttttccagctctgaagactggcctgcttttgaataatagctggggtgcacctagaaatcaggggcgaatcacacaaaatgagcgggacccaggagaccaggggcttgcacaagacaggtctcttctcaaagccgtccttccagagcaggaccgtcagtccctcgcctgggtcatggagatgcggtgtcctcagaggactcggcttctggcccgaggcctctcccggcagggtctgagaaacgaaagctgcctcaccatgaatgccagtcctgcgtttttgttttttctgcactaaattaagccgctgcccaagtgggagttaagtcagacaggaagagggcaggacccccacaccgctgctgcgtactgtttcggaacagcttgtcttccgtaagccctgccagacagtggattaaacacaccccaggccccgcatgctggctggtgccccgtgcccgacaccggccctctcccagcccccaggtcttgggctgttctgtggctcatgatgtgtggatttgcctgctgttgaaccaggtcttctctttccttcatatgcacctgtcaaccaaaatgctttttgaaaaacagaactttacagctgggcatggtggctcacacctgtcatctcagcacttcaggaagccgaggggtggggattgcttgatcccaggagtttgagaccagcctgggcaacatagtgagtcctcatctctacactttttttgttgttgttttgttttgttttttaatagagacagggtctccctctgtcacacaggctggagtgcagtggcacgatcatagctcattgcagccttgaactcctgggctctagcaaccctcccacttctgcctcctgagttgctgggaccactggagtgcacccccacatccagccgtaaagctctacttttataatttatgtttatatttttattgctctgttctcataatttatcatttttttaacatttatttctatttttgtagagacagggtcttaccatcttgcccaggctgctcttgaactcctgggctcaagccatcctccctcctcggcctcccaaagtgccgggattacaggtgtgagccaccacacccagccaactacaaaatttttgttaaaattagcctggcatggtggccgcctgtacctgtagtctgagattctcaggagggtgagctcagattctcatgagggtgaggtgggtggcaggtacctgtagtctcagatactcaggagggtgaggtgggagaatcacttgagcccacgtcaaggctgcaatgagctatgatcacgccatcgcactactgggtggtagaacgagaccctgtcctaaaaatgtttttaacaaaaagttattttgttccttagtttagattaaggtgatagttttcaaagaacattgaaagggacctgtcatattcagtaaagaagcgaattgaattaaaaacacaaacctgacagaacacagcccatatgagtgtacccacacatgttggtgagctcgattcataaccctgagcccccgagactcacaaagatggcctgaaacagatacaggcaaagggctaccaaagttctcgctttcagggctatcaggtctgaaggaacaggctggctttcttagttttgttttgttttttgtttgtttgggtttttttgttttttgttttgagacagtgttttgctctcgttgcccaggctggagtgcagtggcacgatctaagctcactgcaacctccacctcctgggttcaagtgattctcctgcctcagcctcccgagtagctgggattacagaagcctaccagcacacccagctaatttttgtatttttagtacagacagggtttcaccatgttgaaatcagccaagctgatctcaaactcctgacctcaggtgatctacctgccttggcctcctgaagtgctgggattataggtgtgagccactgtgccccgttggctttttttctgatctctcagttgggagaccacccgtttggctggagtcgtggggtctggccaggtccaaatgatgacacaaacccagacaggaagtgcagctggcatccatcagtccagtgtgcccagtgtggggagtcccctgatgccagtcaaacacggctccactctggaggcctctttgtaagctaagagctgattctcccaaatgctccctagttacacagaaaaggaccttccttgtcttctgcaaaataaatccaggtgggatttggcaaagagctggggcacatggcctcctcggagctgcatcaatacacttgcacttcgggctccgttctgcgtattcgtgctggacgaggacttgcagaccagaaaagtagcccttgggtgagcagttgaagttaagaccctcggctcctgggctgacttgctagaagggcgtgctgtcattatccctggggatcaaacgtctggtctgtgtggccacactccaaaggcaggctcaaaggtctccatggtactccagggccccttgaggattcgggtctgtgggggctgcccgggaagggacggagagcgagggcccttggaggcagcctgtttgctccacacaatgacaggtgacttagctgtgtccttcccgggagccacagtggcttcacgtacccctctcctatccccagttcagagcagaatacatgcaggctggaggcagctgtggtttgcagcctgatacttgctgaagacatttacatgctttgaagaaatgtgtttcagttttgggtctttactgagaatgagccagagggggaagaacttgtggtgagggagggtcttatctcttcccaggccacatcagcctggggccaactggggcagtgttgttgcccctctccccgctcccttgtaggacttccacccccacctccaaccactgacaagtacgtctgggaatccccgaagatgtctttcataagctcataaataaacctggtcacacttatggaatgcctgctcttaattttcttttctttttctagccctcactgtcctggcctctggttctgctaaggtgtgtgacggtggaccaccatggtcctccgattgggtgcccctgctacaagtaccatcagcccctgcagcctcttgagagaggtgacagtggtggcacatgggtacggtccccttgccctttgccccttgccccttgccaggcaccgcccaaagccctgggcactgctgccggtgctggtggtggcagaggcccctgtggctctcgggcattagcctgtaggtcttctgctgcaaagcgcctctcacccctcctggttgcgtgggtggggtggtcctgaagccccgtggcttcctttatttctgccttctctgtagaattcaaacatgaaccctgcagggctagaccaagacacaaatatcaatttctaaaaacacccctttgagggttgggcacggcggctcacgcctgtaatcccagcgctttgggaggccgaggcgggtggatcacctgaggtcaggagttcgagaccatcctggccaacagggtgaaaccccatctgtacaaaaaatacaaaaaatagccgggtgtggtggcgcatgcctgtagtcccagctactcaggaggctgaggcgggaggattgcttgagctcaggagagatcagtctgggcaacacggtgaaacaccatctctacaaaaaatacaaaaactagcctggtgtggtgctgggcgcctgtagtcccagctgcttgggaggctgaggtgggaggatcgctggaacctgggaggcagaggctgcagtgagccaagatcgcaccactgcactccagcctaggtgacacagtgagagcctgttgaaagaaagagagagagaaagaaagagagagaaagggagggagggagggatggagggaaaaggagaggagaggagagaaaggcaaggcagaggagggaggggagcttggccaaggtggtggcacctgggaggcttatctggcatcctggcagcaaggctgggaggctggtggtgagcacctggcccatgctgatcttcccacctccctggcctctactgacgtgtaacttgttctgctcggccattgagtgccactctctgctttttttctttgagacagagtctctgtggtccaggctggagtgcaggagtgcaatctcagctcactgcaacctccgcctcccaggtccaagggattctactacctcagcctccagagtcactgggactacaggcacctgccaccacgcccagctaatttttgtatttttagtagagacatggtttcaccatgtcggccaggctggtctcacactcctgacctcaagtgatccactcgcttcagcctcccaaagttctgggattacaggcgtgagccaccgcgcctggccattctcagcaatttaatttaatttaattttgagacagagtctttctctgtcacccaggctggagtgcagtggcatgatctcagctcactgtaacctctgcctcccaggttcaagccattctcctgcctcagcctcccaagtagctgggactacaggcatgcaccactacaccagctgatttttgtatttttagtagagacaggctttcgccatgttggctgggctggtcttgaactcctgacctcgggtgatccgcctgcctcggcctcccacagtgctgggatgacaggcaggagccagcacacccagccctactgtctgctttggtgtccacgtgccgcctgctttccattctgcttgttccaaatccaggtctcagccaatgtgctggtcctttcactacttctgggagcttgggagctcttagcagccattacctgcccatgattgggtaggagggactctgcggtacacagaggcctcccccttaggcctttctaactggacagcaccctcaggtcctcactcgctgtctcctggtgccttgttgaacacagaacttttctctgggggcttcagtctcacaggggcattgctggaagccagacagtggcttctagattagcatcctcctcaagctgatgggggtgcttctcctactggggctcagcccagagtgctggggctccgggtttcttctcagggacctacaagcctttaagcctctctggcttttcttttctcatctgctgggcaaaatccactttctttctttttaggtggaaaaaaaatgtttatgtccagatgcccggtccctgtgatgatagtgtggattgggtgcaaaaatgcttcagcattttggttcttaacatttaaaggcagatttttagaataagaaaacaaaccaaaacagcattccaacattcttacattgatagcacggattccaagacttttgtctctactgcagaattacaaaagtctgcacaagaattcaagcaattatctcgataccatctgcacctgagcgcagtgcatagacgaggccccacctgctgctgcggaaaggggcaaagaatagaaaaacaaccacttaacagcaaaatgtgacttcgctacctatccaaaggatgatcattgatgtcctgagagaaccaagaaatcacgcactggaggacccctgaccgggaggaaaggcaggggtctttactcagtagatcttgaataagaacactctcttgcaagacacagttgggtcacagctggccttgtgcaatgaaaaccaaaggggaacttctgcttactgggtttctacagatagagatgaaactacatcctctctctcaagaaacaggaaaagccacgcaggatgagtgaggatgtgcggtgggtacccacacacccaccatggggatgtgcagcaaaaccaactgcagcaggtgttttggcaagagctagcgggctttttttgtttgtttgttttttgagacagagtctcgcactgttgcccaggctggagtgcagtggcacgatcttggctcactgcaagctccgcctcccaggttccagcgattctcctgcctcagcctcccgagtagctggggttacaggcgccggccaccacgcccagctaattttttgtatttttagcagagacagggtttcactgtgttagccaggatggtcttgatctcctgaccttgtgatccgcccgtctcggcctcccaaagtgctgggattaaaggcatgagccaccacgcccggccagctagcgacattttaaatgtacacctcctttaatctgatttttctcctttttgaaacagggtctccctgtcacccaggctggagtgcagcagtgcaatcacagctcactgcagccttgacatcccagggttcaagcgatcctcccgtctcagcctcccgagtagctgggactacaggagcgcaccaccacacccggataattttttgtagagatggggtttcaccgtgttgcccaggtcactctcaaactcctgggctcaagtgatctgcctgacttggtcttccaaagtcctgggattataggtgtgagccaccatgcccagccttaatcattttaagtggaaatgtaaccattttaggataatgtcctacaaaaatgtgagtacaagcaagcaaagacatttgcagaaagattttcacagatgatgtgagtctaatgccaaaaaactaaacacagccttttggctatattgctagaagactggctgtctcagtgtattcacgctgctacaataaaatgccacggactaattgataaatagtagatcgttgttccttacagctctggaggccaggacgtcgaagatcaggtgctgacggactccgtgcccagtgagggctgctctttgcttccaagatggcgccatgttgcttgttacatggcagaaggcagaaagtcacagggtgtcacacagctcccctgcacctctttataaggtcataatcccattcttgaggccccttcttcatgatttaaccacctcctaagggccccacatcttaatactatcacatcggggattcactttcaacataagaattttggagggacatatacattcaaaccatagcactgatgacataaatgatgggaccgggtgaagtggctcacgcctgtaatcccagcactttgggaggccaaggagggcagatcacctgaggtcaggagtttgagaccagcctggccagcatggcgaaaccctgtctctactaaaaaatacaaaaattagccaggcgtggtggcgggcgcctgtaatcccggctactcaagaggctgaggcaggagaatcgcttgaacctggcagaaggaggttgcagtgagccgagatcgcaccattgcactccagcagcctgaggacagggcgaggctccgtctcaaaaaaaagaaaaaaaatgatggcatagctgagctataaagcaccaagcagccattaaaaataatgagtagatctatacatggcaagggaaaagtccaagatgtacagtcagccttctgcatctgccagttctgcagctacagattcaaccaactctggaatgaaaatacagaattctcaggatgctgagaagtcaagacccaaatttttgtgcccacaggttccacagggctgactcggggcctgggacctgagcatccaggattttgttatctggcaggtgggggggcctgcttcatgttaatttcttttttttttttttcctttgacaaagtatctcctttttcccacatacagatacagagaaatcttcacaggagagtaggacttctgatatatttccatgtagtggttttttttttgttgttgttttttgagacagtctcactctggctggagtgaactggcatgatctcagctcactgaaagctccacctcccgggttcaagtgattctcctgcctcagccccccgagtagctgggattacaggcatgtgccaccaaaactggctaatttttttttttttcccctgagatggcgtctcgcctattgcccaggctggagtgcaatggcgcgatcttggctcattgcaacctccgcctcccagactcaaatgattctcctgcctcagcctcccaagcagctgggattacaggtgtgcgccatgatgcctggctaattttttgttatctttagtagggatgggctttcaccatgttggccaggctggtcttgtactcctgacctcgtgatccgcccgcctcggcctcccaaagtgctgggatgacaggcgtgagccaccgcgcccggccccactgtactttaaaaatgagcattgctactgcaatattatagggtaatagcagcacaggccacactgagccatcagtgtcgtcggttttgagaagagacccgctggagccaggctctttagctccttctgagaaaccctacggaaagaggcgtggagcaggcccagccgggagcccagggagagtggactccgcacaccgagacccgcctgagcagcagagaatggcttccggcttccgcacaccgagacccgccggtgcaggggtgaatggcttccggcttccgcacaccgagacccgccggtgcaggggtgaatggcttccggcttccgcacaccgagacccacctgagcagcagagaatggcttccggcttccgcacaccgagacccgcctgagcagcagagaatggcttccggcttccgcacaccgagacccgccggtgcgggcttcctgggacttccattcttgatttgttggggcaagattttcttttgatttctgtgactgttctctgtgtaatcattaagaaaaaaatgttatgataaactaaccatattggctgacagccagagtggttaggggtgagtaaggtgttgagattgaggccctaggaaaggaaggtggagccatttagaaatggggaattcagccgggtgcggtggctcatgcctgtaatccccacacattgggaggccgaggcgggaggctcacttgagcccaagagtttgagacaagactgggcaatagaataagaccctgtctcaaaaaaaaaaaaaaaaaaaaaaaaaagagagagagacaagaaaagaaaaaaagaaaaatgggggattcaggaaggaagctgagcttacctcgagatggtgcatataagctaatgatgggagttggctagaagacaggaactgaaaattggggggagctcaggtgtagctggtgtttgcacctgtgatggcaggtaagtcctcaggagcctggcatgaaaacagggggcctaagacctcgaggcctggccgctgtcaaggctcagaaggagaggagagctggggaaggagactaagaagtcccagagccagtaaagcagttaagggagaattccggagagaggaggactcacagagttaagggagaattccggggagagggggactcacacagttaaaggagtattccggggaggaggactcagagttaagggaggattccggggagagggggactcacacagttaaaggagtattccagggaggaggactcagagttaagggagaattccggggagagggggactcacacagttaaaggagtattccggggaggaggactcagagttaagggaggattccagggagagggggactcacacagttaaaggaggattccagggagaggggactcacacacagatgcccctccacagatgatggggttacgtcccaataaacccactgtaagttacattgttaagtcaaaaatgcatttaatacacctaacctccccaatgtcatagcttagcctagcctaccttaaacgtgctcagaacagttacattatcctgcagttgggcaggacagatgtgagccgggctagaagggcatcggtgaccttcgagagaagggtcaggacagatgtgagccagacgaagaacctcagtgaccttcgagagaaggaaatgtcaggacagatgtgagctgggctagaagggcatcggtaacctttgagagaaggaagggtcaggacacatgtgagccagattagaataacatcggtgaccttcgagagaaggaagggtcaggacagatgtgagccagattagaataacatcggtgaccttcgagagaagggtcaagacagatgtgagtcaggctagaagggcatcggtgaccttccagagaagggtcaagacagatgtgagtcaggctagaagggcatcggtgaccttccagagaagggtcaagacagatgtgagtcaggctagaagggcatcggtgaccttccagagaagggtcaagacagatgtgagtcaggctagaagggcatcggtgaccttccagagaagggtcaagacagatgtgagtcaggctagaagggcatcggtgacctttgagagcagggtcaggacagtggttgagatggaagctgactttctagaagggcatcggtgaccttggagagcagggtcaggacagtggttgagatggaagctgactttgtagaagagcattggtgaccttcgagagcagggtcaggacagcggttgagatggaagctgactttctagaagagcaccggtgaccctcgagagcagggtcaggacagtggttgagatggaagctgactttctagaagagcaccggtgaccttcgagatcagggtcaggacagcggttgagatggaagctgactttgtagaagagcattgatgaccttcgagatcagggtcagggcagtggttgagatggaagctgactttctagaagagcaccggtgaccctcgagagcaaggtcaggacagcggttgagatggaagctgactttgtagaagagcattggtgaccttcgagatcagggtcaggacagcggttgagatggaagctgactttctagaagagcaccggtgaccctcgagagcggggtcaggacagtggttgagatggaagctgactttgtagaagagcattggtgaccttcgagatcagggtcaggacagcggttgagatagaagctgactttctagaagagcattggtgaccttcgagagcagggtcaggacagcggttgagatggaagctgactttctagaagagcaccggtgaccctcgagagcggggtcaggacagtggttgagatggaagctgactttgtagaagagcattggtgaccttcgagatcagggtcaggacagcggttgagatggaagctgactttctagaagagcattggtgaccttcgagagcagggtcaggacagcggttgagatggaagctgactttctagaagagcaccggtgaccctcaagagcggggtcaggacagtggttgagatggaagctgactttgtagaagagcattggtgaccttcaagatcagggtcaggacagcggttgagatggaagctgactttctagaagagcaccggtgaccctcaagagcggggtcaggacagtggttgagatggaagctgactttgtagaagagcattggtgaccttcgagatcagggtcaggacagcggttgagatggaagctgactttctagaagagcattggtgaccttcgagagcagggtcaggacagcggttgagatggaagctgactttctagaagagcattggtgaccttcgagagcagggtcaggacggtggttgagatggaagctgactttctagaagagcattggtgaccttcgagagcagggtcaggacagcggttgagatggaagctgactttctagaagagcaccggtgacctttgagagcggggtcaggacagtggttgagatggaagctgactttgtagaagagcattggtgaccttcgagagcagggtcaggacagtggttgagatggaagctgactttctagaagagcaccggtgaccctcaagagcggggtcaggacagtggttgagatggaagctgactttctagaagagcaccggtgaccctcaagagcggggtcaggacagtggttgagatggaagctgactttgtagaagagcattggtgaccttcaagatcagggtcaggacagcggttgagatggaagctgactttctagaagagcaccggtgaccctcaagagcggggtcaggacagtggttgagatggaagctgactttgtagaagagcattggtgaccttcgagatcagggtcaggacagcggttgagatggaagctgactttctagaagagcattggtgaccttcgagagcagggtcaggacagcggttgagatggaagctgactttctagaagagcattggtgaccttcgagagcagggtcaggacggtggttgagatggaagctgactttctagaagagcattggtgaccttcgaaagcagggtcaggacagcggttgagatggaagctgactttctagaagagcaccggtgacctttgagagcggggtcaggacagtggttgagatggaagctgactttgtagaagagcattggtgaccttcgagagcagggtcaggacagtggttgagatggaagctgactttctagaagagcaccggtgaccctcaagagcggggtcaggacagtggttgagatggaagctgactttctagaagagcaccggtgaccctcaagagcggggtcaggacagtgcttgagatggaagctgacttgctcggcaggaatgcatgtggggatgggggcagtggactcccttgacgcactaacaaaaccgacaggctgtgggggggagtggcatcaggaaaagcagggggacccctgttcacttctgcaagcagagggtgaaaggggacagtctctgaagacctgggtggggcaaaggacagaccccaggactggacagctagggaaagtggtgtggtgagttgagagcaggatattgagagtggcatgtacacaagtggcttagcttttgccgctcctcttctatggcggggagtaagccagtgattaaacctcttgagatctcagcatcccatctacaaatggagggactttgacaaagttcccaacacggaaacaaacacaccacccaaccccgatgctctaattccaaccttcatgccccaattctgagtttcccaactggaatgctggggccaccgcaaaggtatccagcaaatggccagatactgatccctttagccttggggctgtggagggagggaggtgtccccaggcccatcacttccggccccagcagcctcttctgttgagggaagaggagttactcatgtcgtcacttctgtttcaagtcctgaaaaggtcgggaagcattgcctacacagtcatgcgaggtctcaagcacaagatttggggcttttggaaggattgggttcttctgatcgcccacctccctctgaccaagccccttctccatcccagtgacactgctttgttcttagtactgtctcccttgcaccaggggttactcagagggttctcagatgttctttccaaaggccacaaggcctcgtctcagttgtgccccacagccttatgggtcgagcatccgaaatacaaaatgctccaaaatccaaaatattttgagtgctgacatgacacccaaaggaagtgctcactgaagcgatttggatttgggattttccaattagggatgctgaagtggcatgtacataatacacatattccaaaatcaaaaaaaagctgaactccaaaacactcctgggcccaagcatctcagattagggatgctcaacctgtatttgcacagaatttgggagagagtttaggtgctattgttgaatgggtggctacctcaagtcaaacggtgccctttcctgtactaggtgacagtgccaagcctgacctcccctctaaggtcagaaaaacaatgagcaacgtgcgtcaatgagggcagcagcttccaaacagacacctggggaaacctggaaatcttcagtgatgttttggtggagtgagaacctctacaaaggtttgattctaacttcacttttaaaatgcatttagttttagttctaaaaactaaacattaaaaatggtaataacgcaacgcgcatcctcaaatgtcttctgggggcaaatgtaagatgtcggaggcccttgcttctgttaacctctttctccaagggctgttcacggccatgaagacttcaggagacaaggagcctgttaccatctctgtttaattgaagagcctctaccattgcaagaagagctgtttaaaacaaaacaaaatggatactatttgaaaattcttagctggattaaatcaagatttctctattctgtgcaacccagaagtaaactggggttgatacacacacattttcatccataaccttggtttaaagtgcttcctatttgctggaatagttttcaatgcttttactgatttcttctgaaaaatatttgaactcataaaatgtattcataaaatacttttatctattttgtatagagggaatccaatgtaaaattttgtcccataaatttgaaaactgctggtgaagtacaaaaggcatggatgttggaatgaaggctggagccaaatcctggctcgcccccttactagtcacatagcaaatcctggctcacccctcactagtcacatatcaaatcctgtctcacccctcaccagtcacatatcaaatcctgcctcacccccttactagtcacatatcaaatcctgcctcacccccttactagtcacatatcaaatcctggctcactcgtcactagtcacatatcaaatcctggctggctcaccccttactagccacatatcaaatcctggctgacccctcactaggtacatatcgaatcctggctcacccctcactagtcacatattgaatcctggctcacccctcactagtcacatgtcaaatcctggctcacccctcactagtcacatatcaaatcctggctgaccccttactagtcacgtatcgaatcctggctgaccccctgactagtcacgtatcaaatcctggctgaccccttactagtcacatatcaaatcctggctcgcccctcagtagccacatatcaaatcctggctcactcctcactactcacatatcgaatcctggctcacccctcactagtcacgtatggaatcctggctcgcccctcactggtcacgtatcgcatcctggctcgcccctcactggtcacgtatcgaatcctggctcgcccctcactggtcacgtattgaatcctggctcacccctcacttgtcacgtattgaatcctggctcacccccttactagtcacatatcaaatcctggctcgcccctcactagccacatatcaaatcctgactggctaacccctcactaaccacatatcaaatcctgactggctccacccctcaccagtcacatatcaaatcctggctcgcccctcaccagtcacatatcaaatcctggctcgcccctcaccagtcacatatcaaatcctggctcgcccctcaccagtcacatatcaaatcctggctcgcccctcaccagtcacatatcaaatcctggctcgcccctcaccagtcacatatcaaatcctggctcgcccctcaccagtcacatatcaaatcctggctcgcccctcaccagtcacatatcaaatcctggctcgcccctcaccagtcacatatcaaatcctggctcgcccctcaccagtcacatatcaaatcctggctcgcccctcaccagtcacatatcaaatcctggctcgcccctcaccagtcacatatcaaatcctggctcgcccctcactagtcacatatcaaatcctgtctcgcccctcactagtcacatatcaaatcttggctgaccccttactagtcacatatcgaatcctggctcgcccctcactagtcacatatcaaatcctggcttgtccccttgctagtcacgtatcaaatcctggccgaccccttactagtcccatatgaaatcctggctgaccccttactagtcacatattgaatcctggctgaccccttactagtcacacatcgaatcctggctcacccctcactaggcacatatccttgggcctgtcacttaccctctttgagcctccaagtcccgtccactaaacggagcttaacttagcaggaatttcatccgatgagataatgtatccaggacacagtaaatacacagttaccttttccttcccaccccaccaacatgtacagatagcactgaattgcccaggccctctcatgacctaagataccacatgcaggccacacagcagctggactgtgcagccagggcccagggctaccccaactgacctccactcccctcagcaccctcctctggcctccgagctagccagctgctgatccaaagctctggatcctttagggctgtgcaaagatgtgacaggcatgggtatgaggctgtgggggactctgtgtgtaaactgatgtttctttgtatagcatttgatattcggtgtgggtatgaggttgtggggggctctgtgtgtaaactgatgtttctttatacagcatttgatattgggtgtaggtatgaggctgtgggggactctgtgtaaacagatgttttctttatatagcatttgatatgtattccatttgccttctaaagccctccagtggctgctccagttggtccactgcagtgcttgattttgtgaagaaccctgtggaatgtggtctctggcagctgagaagtgccttccttttccatcagcgcaaggcaaacacatgaagggagctggggtttcttgccaccatttcacctgagacccctgaaagctgcagcccacactgcaaatacttttcttggccctggaagtagagggaagtttgttgagaagctgttcttaatttctcacttgttgaaaaattacccaaaacaggaggcaagacaattgtgcaaattccatttgatgactgagcagaagctcccagaaccctcggatgaagtgagcagcattcccaggaggcgggacgttggacgctatttttattttaacatctcatattgccccaggttctctgagtcaacaccctcaaaggggacagacagaaacagaaaggaacttttgggctgattataaggattcagctggccttgggaaaagtctaaacatctttgaaacacaattggaaagtaatccaaacagcctgtgagctcaggcttcccagttagaactgcctgtcccaagttaatcttgcttagttttttggggggcatcatacctaaagaagaagaagaagaaaaaaggcaagaataagtaaaaggaaaaaaaagaaaaagaaaggcaggcaagaatttttgtccctgtcgggagaagagtctggtctgtggacaccagacacctaagcaagtttcttggaagggaggctttggcaaccctcgcaattcgcattcacaggagacatgccctattttccacaacaggcagcctcgccaccagccccaggagggaggaagctctcttctcagtgtctgcaggtttatccctaaatgctacggaagcagcagctgccaggggaaggggatactgctcagtcttttaaaactctcgtgtaagcttgatattacagtcatgacctaaaaaggcaaagaccagatatgcggagctcgctgcggatgtagcctgcacacggccgcaggatttgtcaccactcatccatgtttaaaaaagccagtccaggcaagacagccacaggctcccgcccacaagtgatcacgaacacacttcacactgccttatggcagagcaagtgcatatagcccggtcttgtgtgaccttcacagccaatattcattataatcccctctcaccaatattgaaaatggatgctcaggggatcagtgactcgcctggtgtcaaagtgccaggtccaaatcaagacctgcagatcaagtcttctgtggatgcttccaatcccaggctgctttcatttctgatggacacgtccttcatgtcccacagatccatggatcgccggcatcttccctcctgttcacataggtgagaaggaaggagctggcaggcaatgcccttccaggtgggctacagggaaggttcttttctcattaggttgatcccttggcttccctagtaaagtggggagctgttgaaaagaaagaatggaaacgaggtaatgatcctggagcctaatggaagggccgcagccagttttcccctgttgaaaggacacaggacttcccgaagagttttcatggcaaaaacgtccaaccagctactaaggaaacaggatggactcatgcgtgcaggagagaaatcactaaaggacacaagacttcccaaagagttttcatggcaaaacgtccatccagctactaaggaaacaggatggactcatgcgtgcaggagagaaatcacttggccgtcactggaagagcaggctgtgatgggaacggtaaggacagagaagggaaggttcacaggatagaaattcacagggcaagtagggttccaagtcagaagcaaaacactttacacaacattacagacaggctccactgcaactgggcaggtcaggactgggctcagtcggccacattctgctcccacgcgttgcttccttagactgtcagggaagggagaagggcagccaccaggagcggccagggtcacggacttgctacttctttcctagagtctgttctgttttctgtcagcagtaaggaaatacattctagcaaatgacatccagtaatgctttaattaactgcagtattttgtgctccaacatgcaggcagaaatcacttccagatggagaaaatgaaagctatttacacaaagaagcaatccctttattttaaggaaatttatatctcccaaaggtgtagaacttcgagggtccaagaggctattctgatgaatactaaaacaggactgggaatttttatttaatatataaaatgtcatcgtacccttcatgtaggccagcatttcaggtgtccatgtttctaaggcttttgcttaaattgcccattggagctctattttatttttaggaatctgacttggagtagacgagaagtgtgagacacttgctgtcaccctcaagcaggcaggttgttctgagtgctcttcctagcgaaggaatcccatttccagcaggttattccgagtgctcttcctagcgaaggaatcccatttccagcaggttattccgagtgctcttcctagggaaggaatctcatttccagcaggttattccgagtgctcttcctagggaaggaatcccatttccagcaggttattccgagtgctcttcctagcgaaggaatcccatttccagcaggttattccgagtgctcttcctagcgaaggaatcccatttccagcaggttattccgagtgctcttcctagcgaaggaatctcatttccagcaggttattccgagtgctcttcctagcgaaggaatcccatttccagcaggttattccgagtgctcttcctagcgaaggaatctcatttccagcaggttattccgagtgctcttcctagcgaaggaatcccatttccagcaggttattccgagtgctcttcctagggaaggaatctcatttccagcaggttattccgagtgctcttcctagcgaaggaatcccatttccagcaggttattccgagtgctcttcctagcgaaggaatcccatttccagcaggttattccgagtgctcttcctagcgaaggaaccccatttccagcaggttattccgagtgctcttcctagggaaggaaccccatttccagcaggttattccgagtgctcttcctagggaaggaaccccatttccagcaggttattccgagtgctcttcctaggtaaggaatcccatttccagcaggttattccgagtgctcttcctaggtaaggaatcccatttccagcaggttattctgagtgctcttcctagccaaggaatcccatttccagcaggttattctgagtgctcttcctagccaaggaatcccatttccagcaggttattctgagtgctcttcctagggaaggaaccccatttccagcaggttattccgagtgctcttcctagagaaggaaccccatttccagctgtgcacatgcagcatttcccctggcattctttcaacagggaaccaggtctcctcatccgatggcaattcaggaagggttggtgtcataccctgcatcgagcagcagcctcggacctgcccccacgctctgcgtgccctgtactggtcatgctggtctcagcttgtctgctctcagtcctgtctgatctgcacagaggagccaccctagacataagaaatcaggcaccccttctcgggggtgggcagagccctgggtactggctctttgttcttcgagagaggaaggagtggcggtagttagcttcaatccctgagctgggtttggagatcagaacaccttgtccattgcggctcctgtttcattgttaagagtccacacaggatgttctctggcctggacaccgctaagccagctttcagacaagtcccctcagtaagagcagagtgaactctttattgattatacaaattaccactatttattttaaacccaaagtgacttcaaagttgttttttggtttttaaaggggctacagaaaatggactgaggggaaggaatgggcacaatatctaggtctagctgaatcacagagctgttagctgctgctttcatccacaggtactccttttaccttattattttttagagagtcttgctccgtcacccaggcaggagtgcaatggcatgatctcggctcactgcagcctctgcctcctgggttcaagcgatcctcctgcttcagcctcctgagtagctgggattacaggcgcccaccaccacgcctggctaattttgtatttttagtaaagacagggtttcaccatgtcggccaggctggtctcgaactcctgacctcacatgatccacctgcctcggcctcccaaagtgctgggattaccagtgtgagccaccatgcccggcctattttttaatagagatggggtctcactctgttgcccaggcttgtcttgaagtcctgggctcaagcaatcttcccacctcagcctctcaaagcactggcattacaggtgtgatgccacagtacccggcctagggtgcccctttgatacgttatttttgaagtgatgttaataaataaagcttctgcttgggggttggtcatcaaaacaagaagaatcctcatcagtatggagagagcccaatcctgggcatggtccccaccaccaccaaaagtcttttttttttaactgagtctcactctgtctcccaggctggagtgcagtggcgggacctcggctcactgcaacctccgcctcccggattcaactgattcccctgcctcagcctcccaagtagctgggattacaggcacccgccacctgcctgctttttttttttttttttttgtatttttagtagagatgggattttgccatgttggccaggctggtctcaaactcgtgacctcatgtgatccgcccacctcggcctcccaaagtgctgggattacaggcgtgagccaccgcgcctgacccaacacaagtttaaaatgaaagctgttatcagtagagaatcttcaccacgttggcaccagctcaagtgtagtgtcggcgcacttttagcttagagtcagaaaaatagacatgtatgaaaatgcgtggcaggagcccttccataaagcaaatctctctgttgcagtggttcttaacaaggtgtaaacgttataactacctatggaacttttaaacctgtatgccaggccccatccaaacttactgactcaaaatctccgggcatctgtttttttgtttgttttgagatagagtctcactctgtcgccaggctggagtgcagtggcgtgatctcggctcactgcaatctttgcctcccgggttcaagcgattctcctgcctcagcctcccaagtagctgggaggtgtgcacgccaccacaccccggtaatttttgtattttttgtagagatggggtttcaccatattggcaaggatggtctcaatttcctgcgcttgtgatccgcccgcctcagcctccccaagtgctgggattccaggcgtgagccacggcgcccggccggcatctgtagattttaaaaggccccagtggttctgatgcacacccccagaagagaaacacagcgtctctacacagtactgagtccccatcaaggagacatttaacagaaactcctactgacatccattggttccttggggattactgacaatgtaacaaatcaagacagcaacttccctggctgtgaccaccaactgtggaaaacagcagcttgatagctcaatgctgtgatggagccgtccggaaaacgactcctcaacaatgaaccaaaaagagaagtggtgatctgtacacaaacgccaggagtgacaagaaccaggtgcaggagtccactggctttcccagctctcctgggttgaggacagacggctgaactggctgtgctatttggagatgggccccaccgccccttttcaactgtacggctcaggctgcttaaccatagcaactccatgggctggggtgggggcatctacagggcttcctgggggctctcccgactgccgccccccgcccttgtcttatttggaatcttttcctaatagacctcaactgaaggccgcatctccttctcgcaacacttcttttctcctccgcattctcaaatttgagacgcttgatgcgtgagagtcaaaccagctagcaaggacagcctggaagccgatgaagaaatgacactcaggatcagagctggacggcatcggggagaaagcctggcagagagggcaggggcacagagcagtggttatgttgggaaacaaggtggggatgaggaaatcaggtttccaggcagatttccaaaccttattcctactgtacggctgttacaagttttatggattttaaggaaatttcctctatcctgaaaactttttgagaaggggtcttgctctgtcacccaggctggagtgcagtggtgaaatcttggctcactgcagcctccacctcccgggtttaagtgattctcctgcctcagcctccccagtagctgggattacaggcactcgccatgacacccggctaattttttttatttttagttgagacagggtttcgccatgttgggcaggctggtctcgaattcctgacctcaggtgatccacctgcctcagcctcccaaagtgctgtgattacaggcatgagccaccacacccagccaattttttgtatttttggttttgccaggttgcccagactggtctcaaactcctgagctcaagcaatctgcccacctcagcctccctagcagttgggactacaggtgcatgccaccacaccttgcaaatttttatttttgtagacatctgtatgttgcccaggctggtctcaaactcctggactcaagtgatcctcctgccttggtctcccaaagtgttgcgactacaggcatgagccgccgtgcctggcaagatatcattcttcagcaaaagcaggcagcaacagcagcggtttgcctgtagctgtggtcatggttaactgaggcctggtttcaagggaaccgagtgaatcagggttaacggcttgatatgctgccattctctggatgcaggatgacatgagaggtcgggagcagtctcttcggcaagccctgctgcagagagcccgcggtggacaggaagggcggggggggcgggcaggctgcgtgccaggccaggctctcagcctggtctttaaggtccatattctgttcctgaggcatccagaaccccagactccttctcataacacaggaacacatcactgggatgctgcacatcacctttgctatttcagatgacgctggaaagtgctgtggacctgaaggtgagtgggcagaaaggggtttgagagtatggacttcctgggcgttcccatggcttcatctgatgagaaaacctaggaaacgtcttccaagtgaacttcctggtttcccttccctagaaaccaggagcagggtgggagtaaagaaatggaggaaggggctgggctcggtggctcacgcctgtaatccgatactcaggaggctgaggcaggagaattgcttgaacctgggaggcggaggttgcagtgagccgagatcacgccactgcactccagcctgggtgacagagcgagactctgtctcaaaaaaaaaaaaaaaaaaaaaaaaaaaggacgggtggggcccacgtgtcaagagggtgtgactgccatggggaggctacatgagtcaagggcagctcagggacctatcctccactgctgcctctgcttcacgaaccagagatcacctaaatcgccctcttagagcccagcccttactcagcgtctccgattagggcaggaagtaagacagggcatgggagagactcagtaacaacccacatgtcccaggaagtttgaagaccgacgatgtgagagtgccggggagcacaggagaggttgggggcttctggggaacgggcgctgagggtctccagccaggagcaaagggccccttgctgctgctacagtctctttttaatgagtttctcgagcttgcggatgcgtgacgactcttgctctggtgttggcgccgtcagggacagtgagccggagctttctgcccccgagggcggtgcggggagccgctggcgcaggagttccagcatgctgctctgctcactcctcttcagcccctgaggttgagagagaaacagaaccgtcacgaagtctgggccagaatggcccacgggggacagcgcagtatctggatatggggtcagcagaggctctggagacagcatagttactccaggctgaggatgaaccgtttcctcaagggactcaccatcccctgggtagtagcgtgggaggaaaagagaggggaagaaaaggtaaaggaagggaaagaagcggctgacagaggagaaaggacaggtcaagaaggtgggaaggacaacatgcctgtcctcatccccctgcccctgccccatcctccctgtgcaggtggtctcagcggggcatgcagggcctgtcagaatcctgaagtgcacgtgcccggggccatcctcctccagaggcttctctgaatccggtttgctctgtggagccaggcacatgcattttgagaaagcccccccggaacttatatcccaattcccggttaagaaccgctgagtgtgagggggatgagcaggtgtggaccaaatgtcccggcacaaaccttcatgtccagtatcttctgaaaggtttctgtgttgcagtctgtgagaagtttgatgtagttgtcaacaaacaccaccaacggttcatgaggggccatcactacctacagcgggaggagacaggagcaagcccctcaggaaaactaccaccacgggaggagacaggagcgggccctcaagaaaactcactacccaccgcaggaggagacgggagcgggcccttcaggaaaactcactcctcacttgcccgccgagcgctaaatggattctgagaggtttccttaagcagcagcaacccagactagaaacgccccagtggcccatctcatcttcacatgccactacagcaatgtcctaaatttgctgaatcctaaatacacctgcgctgctgtttgaagtatgggtttccggggccctcctctaaagactctaattcagtaggcctggctggagtcccaggtgacttttaaactatcaggaccatccgggaaaccctgcgtgagagggtctcctgttccaggcatttcaccagtacacggtacttgctccttctgccttgacgtactatgattcctgagaaatgggtggcaaaaggagctggtataagtaagtggatttctgcaaaaacaaaaatgccaaagctgcctcaccttttggagacttaaaatctgtaacttcatgtaacgactaacttaaactatcaattaacatacaaacaaaggaaaggaacggcactgcaacccttattcatttccgttttgttctggaatgcagtatctgattttctttccccagccgactgatttgttttgaattcctgagactgaagggaagagtggcgaggaggagttcactcaggcatcctctgccgataattcccagaccacaggctctcctccccagcagtaagcagcagggaaagaacatgatgaggcagcttcaccctcacctacatgagctcttcaccctcacctacatgagctgcttcaccctcacctacatgagctgcttcaccctcacctacatgagctcttcaccctcacctacatgagctcttcacccttacctacatgagctgcttcatcctcacccacatcccaccggtgtctgaggccctgctgccacttcctactcctgccgtccctgagtcatctggtttaggaagtggcctgaagagcctacaggtcctgggcttttaagaccacatcaccacaggaccatctgttctccagccctcatccctactcttcaaaatagctggaaaccagaggcagatgcgcagggcttcagacgttcctcactcgaagtacagtcttgttaaatggggctttaaaatatccatttgctgattagattcagttactacaacatctgttcagagttcatttaaagtggcagagtacagaaagccaaaaaggctgatgtggaagggagtaactgagagctgtgcctgaaattcctgctgagaagcggagatccctgacatacactgattcacagtggcaaccacctaacctccaagcttgaccacatttgatcacaagagaatcccacgccaacaagaaattcatttgtcagaaggaattactgagccctaataactatccacagactttcaacaatatctgatgaggccaaaatccagtccagcccaagaatgtggaccatgctttgaggccggtgaggataggacctaccctgtgctttcaaaaccaaggcttctcagaaaaagagattaaataaataactggccccttttaacacaagccatcaccttgaggatcatctcagcccgggtcatgcctttgacaacgatcttggtgtagctggcgggtgccttcctcaccacctgcgagctgatggaggggagatcgagcaggaccatcttcagcgagtgggtgtccagcagcagctgtggagcaaagcagagagcattaccggccccttccagcgacccagtgccgagtggactcatgccgatgagtcatgtttttctcgttatacacgtaacacattcttgttgcaaaaaattggggaaataaacagaaatataaaagaaaaaaattatgtataattcccatcacctaggagaaacaacatcaaggagccagcctatgtgtacgtatataaaaaactaaatcagggggccaggagccgtggctcacacctgtaatcccagcacttcaggagggccaggcagcaggatcgcttgagctcaggaatttgagaccagcctgggcaacatggcaaaaccccgcctctacaaaaaatgcaaaaattagccaggcgtgggggtgcgcatctgtggtcccagctactgaggaagactgaggtgggtggatcgcttaagcctgggaggttgaggctgcagtgactcaagattgtgccactgtaactctccagcctgggtgacagagggagaccctgcctcagtaacaaaccacaactcctccataaaactaaatcagaatcatactgtatgtatattcaattttataacctggttttctcacttaatatacacaatttttatattctattttcccatctttgcagtctttaaaaaacaaatcaaggtttttaagtgcactctagcctgggcctcatggcgagaccccatctctaaagaagaatcgtgatttaatggctgtgcagtactctgtgatgtgtgtggttgtgtaaactttaagatctttccaatggaatggacccatttacacctctgccagccatgcagactgcacccttatcagcactgaaaactcatcaaatcctgattattcattaggcaaaaaatagtaactcattattgttttactttgaatttctctggatgttactgaggatgtaggagatttacccaaatgtaaacattgtatcctggcaacaatctaccttttcctctttgtttgttctggttctctgggatgccaattatctagaaggacacccatagtcctaaaggctcactgactgccgggaatgacatgaggaacgttttgtcacatttaatctgagtaaagccttacctaccctggatgttatttattgttcccattttacagatgagaaaaagttccagaggattaacagctcaccaaactcatctcatgcaacggacggggttagacaaaagttggacgggaagctggaattcatttccggttgccaggtaacggggttagagaaaaggtggactggaagctggaattccatttccggttgcccaggtaacggggttagacaaaaggtggaagggaagctggaattccatttccggttgcccaggtaaatgtccctgggtggttttggtgacgagctcacactgactcctgctgactgccctgctctgctgccgccgctgctcttggcaaccagggagcagagaaatggctgaagacagaagggtgtactctggcctgttgagatggcttaggagaatggaaccacatggtcaccaagcagacaacggcagcagtggggtgacagctcccaatgccaccactcaactccggtgataacggccaaacttatattcagggcaaggcctgtactctctgccactgcctgcttctttgggaaagccttctgtaatcctatcaggtaggtgagaaatgggacccttcaggccctgcgacactttgcatcctccaatttcctatttactttgctttggacagaagaattaatgattaaagagaaactaagtaacgacagatactatgaacttaagggttatggcaattgtaattttaacaatggtagaaacatggggaagacgtcagtgttttatgtggaataatttaggtgtggtaaggaattacactaaggtcagagcaatttcatgcagctagtcaaaggcctgcaccacgcaggtcattcaactgtagccagcaaagtgcagggcattttggacctttctggatttctagagatagaaattcttactatcctagtgtctgctttgttgaaaaggccaagggctcagagaaaagggtatgcaaacctccaggagggggaatggcactgattgctcaaggcccacgtgaagagcctggcgttagcgcactttccagaattccagtggaaatgactgctgcttttcctcggaggaacccagaacaagcctctaaagcattctaggtggattaaattcttagatataaaaaagaaaaactttaagaagaaaatacagggcgcagtggctcatgcctgtaatcccagcattttgggaggccgaggcgggtggatcatctgaggtcaggagttcgagaccagcctggccaacatggagaaaccccatctctactaaaaatacaaaaattagccgggtgtggtggcgcatgcctgtaatcccagctactcgggaggctgaggcaggagaattgcttgaacctgggaggtttgcgctacagcctgggtgacagaacaagacactgtctcaaaaaaataaatacataaaaaataaaaaataaaaaagaagaagaagaagaaaatacagagattattttcattgcttatgggtggagaagaatgtcaaacatcagaaagaatgaaccacctaccctaaaatgaaaggcatctatatcagaagaaacaaacaaagtaaaagacaagacataaatcaggagaagatacgtgcaacgttgacaagggaacggggttccgaacatgaagattcctacacatcaacaggaaaagcacaaactatcccaacagcgacacaacaacaggcaaacaatactaacaccggattcacaaaagaggaaactcaaatgcccgaaaggcatatgaaatgacacgcaacctggttagtaactgggaaatgcaaattaaaaccacagatgtacaccataatacatccatcagagtcagaagtaaacagattatttgataatcaagtgtgggcacggccatggcactgaaattcacaaatgtacaccgtaatacacccatcagagtcagaagtaaacaggttgataatctagtgtgggcacggccacactgaaattcagactagtggtgacagtagaagttagttcaagcacgttgggggaaatttagcaacatttccttagctggagatgtgtatcacccataacacagcattaatacttatatccattagaggaattcttgcccatgtaaaaacgttccctgcatccgctatttataaaagcaaaagtttggaaacaacctacacgtccattgacagtggaatgaataaacaaatgacagcacattcgtgcaatggaatatgctgctgaggtgaaaatgaatgggtgcacacagcatgcattaacatgcataaatctcagaaaatagtaagttgggcaaaaaaaagcaagtggggaaatgatatgtctaatgccatttatatagttttaaaatatgcaaaacaaaatcatatatcatttgtgaatatatacacatatatcaaaacacatatgagaataaaatcaaaatcaggacagtgtttactttggggcatggaggaagagatgggcagggtggggttcatgggggcggtcttcagcaataactgtaatgatttactttacataaaaatgatctaaagcaggcagggtgtggcagctcatgcctgtaatcccagcattttgggaggctgaggcagaaggatcacttgaggctacgaattcaagattaccctgggcaacacagtgagaccttgtctctacaaaaacaaaaataataagattagacaggcacagtggcacacacttgtagtctcagctacttaggaggctgaggtgggaagatggcttaagcccaggaattccaggttgcagtgagctatgatggcaccattgcaccccagcctgggagacagagtgggaccctgtctcttaagaaaagaaaaaaaaaatgggccaggcgcggtgtctcatgcctgcaatcccagaactttgggaggctgaggtgggaggatcacttaaggtcaggaatttgagaccagcctggccaacatggtgagaccccatctctactaaaatacaaaaattagccagatatggtggtgcacacctgtaatcccagctactcgggaggctgaggcaggagaattgcttgaactcgggaggtgaaggttgcagtgagccgagatcgcgccattgtactccagactgggcaacacggtgagacattttctcaaaaaaaaaaaaaaaaaaaaaaaagatgtaaagtaaatgtggaaacatgttacatattttgctgagctgagtagttagttactgttttttacattattttctgtacattaattaactggaatttttgtttaaagactaccattcaggactcaactctgtcttccatgtagcaaattttgagagccttgtcaaaatcaaagccatgtcttagcattcatttgttggtaggaaaaaaaaaatcagtcattatattttaaagcatatggagatatttcctacttttctacttcccagagatacattatatgcataaataattgtacagtcttaaatgacaggaagggtttgaatgcaccaggcataattctctagtgtccctcatatacagggagatatgacactttcattccctggccagtcaccataaaattctgtctttaccagacactgagaggtgaaaaccctggtctcaggttttatacataaagcaaggcagtcagaaaaggcgggaatgagcctgacagatttggcggctgtctgtgcaaagacaagacagaaaggtcccatttatcatgaaaatctgctagttttcaactttgaaatagttgataattcatcttcttaggcatgagacattgggcaaggggtggctattgccacattcatttctgcctcagcgataatttctggggcagtgtgggctggctaatgttgttgatgggatgtgggggtgcaagggtggccagtatgccatgcctgtgaaggctgatcacccagcaatggaaatctttgagaggggccctttacttcccgaggagcctcctacaattcttggggacatgatgactatcaacagtgatgaaaattttgcgtaaataagatacaggcccacactcctagaagacaaagaaccatgtgaacaaaaccacataggtgaaccatattggtcccaccatagaaaattcttcaatgaggtggcacaggggagacagctcaggctatcaggagggatggaacaaggtggacacatgttctatttctttttctttttaaaaaaattaggtataactttcacagagtacacaaacaccacgtatgccatttgatcaacatccagacatgtgcacatcctgctgcctaacggaagacagagcacacttctggcatccctgaagccttcctcatgctctcgtccagtcaatgctctcctttccctctcaacaaactctcctgctgtctctcactgtagctagttgcctgctcataaacctgctctgaacattcgtctctcctactctctctcactgtagctagttgcctgcttcataaacttgctgtgaacattcgtctctcctgctctctctcactgtagcttgtttcctgctcataaacctgctgtgaacattcgtgcgcatgcctttggtggtcataaagtcctcatttctctagggtggaagctactcaagagtagaactgctggatcatggggtaggcatatgtttggctaactgcctaggagttttccaatgtggctgggctaacttccatttctaccagcacatatgaaagttccagatgctccacatccttaccaacacttggtatcatcactcttttaaattattattatgattagagacagggtcttactctgtcacctgggctggaatgcagtggtgcaatcatagctcactgcaaccttgaactccttggctcaactgatcctcctgtctcagcttcccgagtggctaggactacaggcacgtgccacacttggctaatttttaaattgttttgtagagatggggtctcgctgtgttgcccaggctgatctcaaactgctgagctcaagcagtcttcctgccacagcctcccagagtgctaggattacaggcacaagccatcgcacttggccaaagtcttttaagtactcaaaataaccaatcttttcttttatggttagtgcttttaatgttttgtttaagggatctttgcctaacccaaggtcataaacatattgtcttatattaaatcttccagaagctttattgccttattttttagagccataatccatctgggattaattttctaaaaatggagatataattcaaaaaccataaaatttaccttttggaagtgtacaattcagtggtttttaaggtctattcacaaggttgtacagctgtcagcattatctggtttcagaacacattatcaccccagaaagaaacccttacccattagcagccattcccatctccccctccctcagcctttgccaaccattaatccactttctgttttacggatttgcctgttctggacatttcacagaagcagagtcacacaataggtggctttttgtgtctggcttctttcacttaacatggtttcaaggctcttccatgttgtagcatgaatgggtactttattccttttaatggctgagtaatattcccttgtatggatagaccacattttgtttatcatcagctgatggacatttgagttgtttctactttctggctattataaatggtgctgctatgaatatttgtgtacaagcttttgtgtgaacacatttttttttcaattcttttttttttttttttttttgagacagagtctcaccctgtcacccagcctgaaggtacagtggcgcaatcttggctcactgcaatctctgcctcccaggttcaagtgattctcctgcctcagcttcccgagtagctggagttacaggtgcacaccaccatgtacagctaatttttgtatttttagtagaagtgggttttcaccatgttggccaggctggtctcgaactcctgacctcaggtgatctgcctgcctcagcctcccaaagtgctgggattacaggtgtgaaccatgcaccctgcctttttcaattcatttgggtatatatctaggagtataattgctgggccctgtggtaactctatgtaaatgccaaactgttttccaaaatggctgtaccgttttgcattaccaccagcaatgtatgagtgttctaatttcaccaaatcctctttggaattgatttttatatatggtgtgtggcaaaggtcaagatttttttccgatatggatatccaattacccagcactatttactgaaaagactctctttgaatgatgccactttggtcataaatcaagtatctacacatgtgtgggtctatccctcagctcagatctgttctgttggcctctttgtccctggggccagtgccacactgctctaattacaatactgctgcaataagtcttgatatcctgagctttaactcctccaattctgttctaagattattttggctgttgtcttctgtattttcatctaacttttaaaatcagcatatcaattcacacacacacactcacacacacacacacacacacacacccctgctgggattctactgtatctatagataaattgatacagtaattaggattgaattctatctatagattaattttggaataatttgccgctttttaaattgttatttattttttattgggcagcctcctcagccagagcaggctcagaaagactccatatgtatttctttttgagtctttcttatcaatgaacatgagctatcctgtcattttaaaggtctttatggattctgtgtcttaatattgtacagttttctgtgtagaagacttgtacatttttaatttactcctaggtatttaatgtttcctgatgttattgtaaatgatttcatttaggcctgggagccatggctcacgcctgtaatcgcaccactttgggaggctgaggagggtggagtttgagaccagcctgggagacacagggaggcagaccctatatctaccaaaaaaaaaaaaaaagagccagccaggcatggtagtacattcctgtagtcccagatacttgagaagttgaggcaggaggatggcttgagcccacgaattgagactgcagtgagctatgattgtgccactgtactcactccagcctgggcaatacagcaaaaaaaaaaagtatttcactcaaaaatgttcatttttaaattgtttgctgctggtatatagaaatatattttaaaacactttccttatagccagcaaccttgctaaatttatattctttttttttttttttttttgagacggagtctctatcactcaggctggagtgcagtggcgcaatctcagctcactgcaacctcccaggttcaagcagttctcccaggttcaagcaattctcctgcctcagcctctcgagcagctgggattacaggcgcaccacaccttgcccagctaatttttgtatttttagtagagacgggggtttcactgtgttggtcaggctggtctttaactcttgaccttgtgatccgcccgcctcggcctcccaaagtgttgggattaagggtgtaagccactgcacccggcctgctaaatttatattctaacagtttatctgtagatccttttagatttattactcataatcatattttccatgaaaaatgacagcttagtttcctcctttctaatctgtatatattttgtttcttttaaaaatattgtattttttgccttgttgtcctagccaggacttcaacaacaacgtgggatagaaatggtgacagcggacattctcctcttatccttaatctcaagggaaagaaaagctttcataggtgaacgcagtcataagaataattagtgaccctgcaaaacaggatgatctgaagatcataaactagcaagaagcatgatcaatattggtgtgggtcagttccacgtgcccttgcaattgctcgaggactctggggcccaaagataaagaactcactttatatagtactcagagaacaaagagcagaaaaatgtctcccatcccattttcagcataagtattaaagcaaaacctaatttaggatctggcacccttgtggcaaggcagacacagctgaggttgggctaaatcttagcttccaatgccatagcttttgttcaagtttggatggcagctgctccactactggaggcagcgtctgtttcagtctatgaacactgctgagttaacttgattctgatggttctgctgcctgagtgaacacgcctgcagctacatggctgcttgagtttcaaggcccagacatcagggcaagtacaggcccagccaaacctcaactcatgtgagaatcgttcaggggccacgttgccctgtagttcccacccacaccctccccattctgggcctgtcaagatccacactcccctactgcccacctgaactggcctggggtctgattaagtaaaactccagttccagcagatggttttctcatccacacctcaaaacggaagtaaacataggatgttggctgtgggtttgttaaaaaataataacaataatggatgtaagcactggatgaactgatatttttctgaagatattggctttgggtctgagcttactataatcattaaaagactctttttttttttgtggggcagatggtgtcttactctgttgcccaggcttcagtgcagcggcacgatcatagctcacttcagcctggattcaaagaatcctccgacttcagcctcctcctgagcagctgggactacaggtgtggaccgttttttagctaatgttttattttttttgagagatagggttgcactatgttgcccaggctggtcttgaactcctggcctctagtgatcctcccatctcagcctcccatcactgggatttattctttttttttttttttttttttgagatggagtctcactctgttgcccaggctggagagcagtggcgtgatctgagctcactgcaacctccacctccacctgcaagtgattctcctgtctcagcctcccaagtagctgggattacaggcatgcaccaccacgcctggctaattgttttttttttttttttttttttgagatggagtttcgctcttgttgcccaggctggagtacagtggtgtgatctcagctcactgcaacctccacctcctgggttgaagcaattctgcctcagcctcccgagtagctgggattacaggcgcccaccatcacgcccggctaattttttgtattattagtagagacagggttcaccatgttagccaggctggtctcgaactcctgacctcagatgatccgcctgcctgggcctcccaaagtgctaggattacagacgtgagccaccatgcccggccaatattccaagttttttgctagtttttttgtttgtttgtttttttgagatggagtctcactttgtcacccaggctggagtgcagtggtgtgatatcggctcactgcaacctccacctcccgggttcaagtgattctcctgcctcagcctccccagtagcctgcccccatgcccagctaatttttgtatttttagtagagatgggatttcaccatgttggccaggctgctctcaaattccttaccccaggtgatctgcctgcccaggcctcccgaaatgctggggttacagcgtgagccgctgtgcccggcccagccacttcttcttattggagtgtgagcactaggagcagggacctttccatggtgcttgctgtgttataccctgcacccagaacttagtaggcgttcaaacaaaatttttaaaaataaatggaagaacgaattaagaaaccttccgggtgagtcattatactgtccccaaacaggggacatcatcaattttattcctgccaagtagatctggactagaagaatatgtgcttgatctacaacaaaagctgccaggcaaatgcctgatactacgtccatctcacctgttctgctcccaccatgctaattggcttgcacttgaagaggtgggtgatgaatttgggaatgaaggagctgtggataaaaaagaagtgacaaattaggcttattctctcttgaggaaagaaatgcaaaaactttaaggttccacgtatctccatgaaaaaaccttttttaatgaagaatcgaagtggactccactgttgcccattatcttatttttcttctgagtgaagtcctggttttgtttagttacatgaggccctggcaggcccgggaaaaccggatcccatcctagactcccagtgaactctaactattctcagctcgtcagagcacagcattcctttggtgactgttgtttgtcctgagagggaatatgatcgaagctagcccaatcagactggatgtaagggctacaggcaccgcacctggctactttttaatttttttgtagaggcaggatttcgttatgctgcccaggctgggctcaaactcctggcttcaagcagtcctcctcccttgggctccggaagtgctgggattacaagcgtgagccactgggccaggcttccttgattcttcattctctgtctccagcctcatcctgctaagccctggcctccctatgcttcaacccaactgagccacttgcagatcccaggattctgggggctatttaatgcctacactgctccctcgcctggactgcctttcctagaaggggcttgtgggtcagtacacacgcacctctcagatcctgttcaacggcgtctctagaaagcctttcttctgctgccttcgccatactctacatggagtctgcaggcctccaccctcacatctaacctagttcattatgctcatttgcttacatgtctattttgcttcacctgactattaaggcaaacgaagatgggggccatgtttatcaggccaaaacatttaactctgggtctgagacataggagatgctcaagtgaatgcacattgagtaaatcataaacttttttttttttttgagacagagtctcgctctgtcacccaggctggagtacagtggcaccatcttggctcactgcaacctctgcctcctgggttcaagcaattctggtgcctcagcctcctgagtagctgggactacaggcacgcaccagcatacccagctaatttttgtatttttagtagagatagggtttcaccatgttggccaggctggtctcgaactcctggcctcaagtgatcctcttgcctcggccccacaaagcgctgggatgacaggcgtgagccaccgcgcccagccacctaccactttttgaatgtcagcttggtatcagcactttaccaggaagttaatatgtgacttctcattttatcttcccaaccactattatgagatttgtctcattatctccttgattgaagggaggaggatcagctcagtggatgagggaagttgcttgtggttcaactgcagtttcaaccaggctgtggattttgatgtctcaacaggaaaggctgctattgcttaagacagcaaacgaggtaaaaggaaacatctatggttttgcaggggtggggtagaaaggaagctgagggagaggaaactggagtccggagatcggatctggaggtggcttgtgatcaggaaggagagtaaacaaggggctatttggaaggaattcctcagtgctggaaaccagagccagacaagcaacatgaaactgaactcatgaccaatggcagctgtgcacacagcgctttgtaacctaagttgcttcacattagaacatgctccggactgggcatggcagctcatgcctataatcccagcactctgagaggcccaggcaggtggactgcttgagcccaggagtttgagaccagcctgggcaacatggcaaaatctcatctctacaaaaaatagaaaaatgagctaggccgggtggcgagcgcctgtaatcccagctattcaggaggctgaggtgggagaatcacctaagcccaggagatgggggctgcagtgagctgtggttgcaccactgcactccagcctgggtaacagagtgggaccctgtatcaaaaaaaaaaaaaaaaacctttggctgtgcccctgaactggctctctatactagtctacaggtggcgatggggggagtatgaggacctgacacacgtcctgtggggaaaaaaccaagcaatgtgctgggtaactgccaagggcttctctgggccatcagggcggtggtggctgctgcccttgaccagggaagggtctcctcacaagcccacctctgttaagcgggattttagcaggatgagaaggcaccatggatgaaaacagaaaaccacttcctagatcccaggctgaatgattacagatgtgagggggggcatccaattcccagcgcactcaacctgggcttagcaatgaaactcaagggctctgagagaatgtgaggctgatgctgggagatgctgggactggctaagtcaaccgactcctccttcactttaacgtaagctcaatcatatgactgagctgggagacgccgggactggctaagtcaacggactcctccttcgctttaatgtaagctcaatcatatgactgagcagggagacgccgggactggctaagtcaacagactcctccttcactttaatgtaagctcaatcatatgactgagctgggagacgctgggactggctaagtcaacggactcctccttcactttaacgtaagctcaatgagaccccggagcagccaccctggagattttgagtcacagtaaatttttacagagacactgcttctaccagcagttatggggagcgtcacgatgtgatttatcagcaacatttctaacacactaatgagcacccagagagtgagggaatttcacctcctggtccatctgccatctgcaaacattaatgcctccctggagagtccactctatcctttcttgacaaactagaaagtaaagctgacaccacaagccgctccataattgttagtcctgaggggttcatttgtgaggtacagggaaactgggagagattgggggaagacagaaacttggagtcctgaatcaccagctggggcctggatgggaacaacccaaatacagtagcttggcctgggctgaccctcctgaagcccttccctgagaagtctgccaaaatgcttgcttgataactggtcagaggagacactgaccctcaccaccacctggtatcacggaaaatggtgctaagccagatggtgatcggcaaagaactaaactatttcctcgcttcaaaactcagggcagaaatggccacacacaagacacagcaggaagacacacggctcagggtgcactcacctgccttggccagggagctccctggcttgtgcatcccaatttctagtgccttcctcggaccaagagtgtgtccaagtatgaatagataaattctagcagccatggtaaaaaataccagggggagggaggacaagaaggctcaaaagaaacagaaccgatggctcctacccttaagaggcatttattaagccagtcagagaaacaaaatgcatatatgaaatccctgaaaaagaattttaattatccaatcctgggcaaggagagcttatgcctgcacagttcaaaacaacagtaggccccattcatttttgtttgccttgacgtggctggcaattgtactgctgttactgttgcctatgactttaagtagcagatttagttttatgattatgcttcttttgtgtacaaattaaaatcagtactgcaggcaccagaacaaaccgcagctggatggtggggacactcaaattgtgaggatgctggtgggaagtatggttttaaaaacaacccagttgagtatgacactgaaatggcggccacacgtcactgtacatttgtccaaaccgagggaatgtccagcgcgacgtcagagtccgggtgataatgacgtgttgatgcaggttcatccactgtaacgaatgtgccactttgtgtgtggggaggtgtcggtaatgggaagactgtgcatgttgggggggtcaggtacacgggaaatctctgtgcttgctgcttaatttggctgtgaacctgaaactgttctaaaacataaagtctattaaaaagaacaagaacccagagatgagcacgccccaggacttactttgcaaatttaacgcagaactgagtgaagtacttgcgtgtggaagccaggttgtcacggatgatggggacgttctgcttgatgtgcagaatgacagaggtgacgtaggggctctggtcaccaacgtgctccacgttctgccactgcatctgaaagggagaaaggatgaggcgttgaatccctcgcaggagaacggtgtcgcctgttactggggaagggaggggctggagtggaagtcaggtcacagctttggtatcccaggaatcaggcccttttgtcctggggagtttcttattcgttctgtagggactgatactcaggacaaatgcgagtgtgcccagcggacccgacagtgaggtgtgacccagaccctttccttttcctgccttgtccccgacctgcctgaaacagccttcccttctcagctaagctacccactcgtaaaggatcctgttctcctgccgagtgccccacagcaggggactgcagcagaacggggagggacaccgactcccaagctgaccggcagcctgggagatgagagaggtggctggactaagtgacatgcaacctggaggggaattcacagacacctttctctccagtcaactgggaggagtttgggattctttaacacagaaaactagaaatgatatgacacgtggggatgttgcttcaaaataatatgaagttaccgggaagaggtgcagatgaaataagatcgtgaagctgagtgacaggtacatagaggctgaccacactgtttcctctacttttgaatatattcaaaaatttccataataaaacacttgaagaggtatgcgtgtagaatcttacactcctaaaacctttgggattatgtcaggatttcaataaggggaagggaaagagaatctctggcaaacactagggtggaccagagggtaagatggagacgtggggaacaggccaggagccaggcgcaggggagagaacattgctgagagcaccgaggtggtccctgaacaagctgtgaacaaaagtgacagacctgcttcaacctgagccctaacgacaggctctggaagacacctatagcaaactggcgggattcttggactacgtggcacttggcaacattgagtcctgggaacagaaggaggcaatgctgcagtgtgccatcccccaagggtgcatgcaggagatgggtgcagcaccagctcctagcctgccccgggctggcagggaagggcattctaatcccgaagagtgggaatggtctggagggttctgctgagtcagcctttcacagtggagctggacggtctggagggctctgctgagtcagcctctcacaatggagctggatggtctgttaaagagatcctaagccaaacacaaaccatataatatgttcatagaaggaagtcagtagttctgaggccctgatgtctctggcaagaaaacactatttttacagagctcttggggaaaggaaaaaatcaatactgagagagcttgtttaaaagaatcacatcgtacgtggatgattctccagctgtgggaagctcaaatgactcctaatgttttttcaaatcagcggatatttgtattctaaaagctttagggatgtgtacacacagaaccacagaaaagcaggaagggacctccatcttcatttcacagataagaaagccaaggcccagaaacatgaagagtcttatgcaaggtttcataaccaggctccacacaggaaaaagaactctaatttattactgggaaaaaacagaaacaaacaatgaagaaacagtagaaaggtctaatatgaagtgacttaacattctaatgctttggttatgtgaaatgttttcctcattatcttttatcttacgcaagaggcttctttttccatttgattttgaagatttgacccatccaaacaatgagcatcctgggtgattttaaatgagctcatagggtgaggccaaaattgacaggtgctgtcagcatttcctgggctctgcagcaggactcggagcagaatgttctgggtagacacagcgaactgggagggcttgatgcccccaaagccaatcatgtccatagcaatgactgttactttccaagctggcagctttgtatatttcaaaatctcaaaacggtttatcaacaataatctaaacatgacagccctccatgaaagaaggtggcgacgtgctctgtcaccagttacaaagcagctctgaagcaagaccaagcaggggcctgggatttcttcaacttcccactggttattccgcatgctcgtcaccgaactcctcttgatgatcactggccaagtcagtatgtgcccacatttggaatatatgtgaaaagagctgatttgctttaatactctggtcagtcatgactccattggtcaagctaaaagaagtattagcaaaggccaagtggattcatgattttaaacttaagtcagcttagtcaactaagaaagtgatttaaagtactagaaaacaataaaaggtgaccttacctttagtattttttaaaaatgtggcacacgcctatagtctcagctaccagggaggctgaggcaggagggtcactggagcccagaaggttggggctgcagggagctgtgattgtaccactgcactccagcctcagatggctgatgcttgccatcatcccccatgggtgactgaaggtttgggtcacaacctgaactgcccaggatagctacattaagaccgaacttcgcaggtccctttgcatggccctaaacatacgtcgtctcatttactattcatacatgatctcactaagttctcacaacaaccttatagatgaggaaattcaaaaagctcaaagagatttggtatcttgcacaaaatttcacagctgggacaaccacgtctatctaaagcccaaaccaggtctatctaaagcccaaaccaagtctatctaaagcccaaacccggtctatctaaagcccaaccaggtctatctaaagcccaaaccccacaacaaggtgcttgctagacaacttcccccccgacccgcccccgccaccctgcccaaaaaaagaataaaagcacttaactaggccttcgttaaaggtaaggcctgtttctcaaggagacgctaatgaaacatagtgatcaagcaaaggactctttatttttcatttttttttgagacagagtctctgctgcccaggctggagtgcagtggtacaatcatagttcactgcagccttgacttcctgggctccagcaatcctcccagctctgcctcccaagtagctgggaccacaggtgtacactaccatgctcagctaattaaaaaaatatatttttttcttttttactttttgtagagacaggggtctcaccgtgttgcccagactggtcttgaactcctgggttcaagcaatcctcctgcctcagcctcccaaagtgctgggattacaggtgtgagctaccacgcctggcccaaagaactctttcaaaaaaggaaacaaacagtaccttgcattggaagaacaaacatcatgaaaagccatcagtagaaatgagacctcaacttttccaggtaaacttttcatttgacatttagaagttacccctctacacttaaaattgtttcttgttgtgctttttgttttgggggcttgggtagagttgaatacagatggcgttcaactggtactactatctaaatgagacacagtttgaagacagtaagaatgatgagtgcctccgggacctagtttaaccaccacaagaagagactgcagggcccagagtgtccccagagcccagcttctgcggcctgggcaggaagtatgtgctctgactgacgctccacagtggggctggggggtcagcactctttctagagagagtctactgtagcaggaactttgaccagagaacagcgctccacaactagcttcagtggatcttgttttttcctattgctataggaagcttggaaagaggtttcttgaaaatgtgaatacttaaattcctacttcttcactggattagagagacacagagcatagactcagacagctgggctctgggaacatttcaggcaactgaagtctcataactgaggctgccggggtgttggcctcaagctgtagactttactcaggcacacacgtacacgctcactctcactctgatgcctggtggggctttcactcccgcagcatctgctatatttataggtaccttcggcaagtgcagcagggcactgagcatcaggtggagaccaaagagatgaaggaatgtttatcaaccgcctgccacacactgaaggaatgtttgtcaagcatctaccatgcaccaggggctgaaggaatgtttatcaagcacctactacgcactgaaggaatgtttatcaagcacctaccatgcaccaggcactgaaggaacgtttatcaagcacctaccatgcaccaggggctgaaagaatgtttatcaagcacctactacgcactgaaggaatgtttatcaagcacctaccacgcactgaaggaatgtttatcaagcacctaccacgcaccaggtgctgaaggaacgtttatcaagcaccgactacgcactgaaggaatgtttatcaaggacctaccacgcaccgggcgctgaaggaatgtttatcaagcacctaccacgcaccaggggctgaaggaatgtttatcaagcaccgactacgcactgaaggaatgtttatcaaggacctaccacgcaccgggcgctgaaggaacgtttatcaagcacctaccacgcactgaaggaacgtttatcaaggacctaccacgcaccaggggctgaaggaatgtttatcaagcacgtactacgcactgaaggaatgtttatcaagcacctaccacgcactgaaggaacgtttatcaagcacctactacgcaccaggcgctgaaggaatgtttatcaagcacctaccatgcaccaggggctgaaggaacgtttatcaagcacctaccacgcaccaggggctgaaggaatgtttatcaagcacctaccacgcactgaaggaacgtttctcaagcacctactacgcactgggcgctgaaggaacgtttatcaagcacctaccacgtaacaggtgctgtgcctgacattttcacatgaccttgctgcctgatgaatgaatcatgtagtgaaagaggtattattactcctctttgtgagtaataataaatgaggatgaaacaggattgaggacagcgagtgacctgcctaaggaagcgtaactgctaagttagcaggaaaggtcattaagatggtacttaagatgctgaaattgagtcagccagtctgacttctgacactgtgcaaccttctaaaggggtgaccgggacaagtcatctaatttctctgagcctcagtattctcgtctataaaattgggatgatggtaacatctataatctattactgaaagataacgcatggaatgctcttaacacagtgtctcgcagcacgtataaattccacagtaaattttagctactgttataattttaagaatacttgcactatcactaaaaatcactaaatttcgataactgataattatcaattaattcagatatgtatcaattaattgaaattatggtgatttaagttttattctttttttcaaaaaaatctgaccgggcgcgatggcaacatgcctgtaatcccagcagtttgggaggccaaggcaggtggatcacttgaggccaggaattcgagaccagcctggccaacactgtgaaaccccgtctctaccaaaaatacaaaattagccgggtgtggtggcaggcacctgcaatcccagctacttgggaggctgaggcaggagaatcacttgaacctgggaggcggaggttgccataagcacaaatcacgccactgcactccagcctgccggatagagcgagactctgtcaaaaaaaaaaaaaaaaaatctgcatttttctaaaatggaagtgatttagttttgtcataatgggaaaaatcttttttatgaaaaagaaagctgtgtcttgattctaggtagaacttgacagtttcttagtcatggctttctgtgggccttctgaaacagatgtgcattttaatgactgaggaaaatgaaaatgagaacagacttgtcttgattcaacgtagaagtgaacttgaggatttcttagctgtggctttccatggtccttctgaaacagatctgcattttaatgactgaggaaaatgagaacagacttgagaactcttctacctgtttcaaagtgtctttgggggattataacgcagcctcctaaatgggtacatgttcacaatcctgaaacctaatataaattatgtgccagacggtaagaaaatttaatttattcagtttctgttttttcctaaaactaccattaataggcaaaacactaggtgtgtttgcttctgaacagagacttggatttatttacctgagtgatgtgagcagccctaggaaaaggcacggagagaggcggggaccatgagaccaacagcccctgctagggagcccacggctctctatcctacgtacaggggcataaccagacatactcatttctaaggatttgtaggatttaaatctaaaagatagaatcctttgtatttccaccaaaacactccaaataactactttttccagaatcaggagaactagttttacttctagcttcactattataagttatatggctttgggcataatatgaagaagagaaggaaggaaggaaggaaggaaggaaggaagggagggagggagggagggagggagggagggagggaaggagggaaggagggagggaaggaggggagtttggagggagggaagggagtctggagggaggggaggggacaggggaagggagggagagaggaaagaaggaaggaagggagagtgggaggaagggaggaacggagagagggaggaagggagggagggagggagtgaggaaggcagggagggagggagggaggaagggaggaaggaaggaaagaagataccagaaggaaagttcattagttttcagggaaaaatattcaacgcagattggaatatgtgggttggctgttcaacacatcttctccactgtagaaaagtcctggtgtcagatcaagaaaagctggagatgaatatacaccatgatgatggtgaatgcttgaagaactcataatcatatcagcatgaacactcgtgtggacccaccaggactgggcacatgctgacagaaatgtatcaactaattgaaattatggtgatttaaattttattccttttttcaaaaacatctggtcgggcacgatggcaacatgcttgcaatcccagcagtttaggaggccgaggctcttccacttttaggcaggttacttaagctgattttgcctcagttgccacatttgccaaaaagacttactcactctctctgtatggcatgccacaatcctgcataaagaggcactgtggtggcgtgatcacagctcactgcaacctctgcctctcaggctcaagtgaccttcccaccttagcctcccaagtagctaaaagatctggagcaggtgatttaatgtctctgtttcagcttctttatctgtgaaaaggggaaatagcatagccatctgatgaatttattgttagaatgaaattaattgggttccaattcctggtaagtgctcagtaaatagtaacttattatcaactcatacaggttatctaagaaaataagcaatatggaggccaggcacagtggctcacacctgtaattccagcattttgggaggccgaggtgggaggatcactagagctcaggagtttgagactggcctgggcaacatagcaagacctcatctctactaaaaatcaagaaaattagccaggtgtggtggtgtgcgccagtagtaccagctatttgggaggctagggtgagaggatcactggaacccaggaggtcaaggctgcagtaagctatgattatgccaccgcacccaagcctgggcaacagagtgaagaaatttttttatgaaagaaagaaaataacactatgggaaggaaacgtggtctagaagttaattttgctgtaactcatcagcaacactactggaatctcaaagtcagagtttcagagggaccacctgactttcatcacattttcctcccccttcttcggcctggcctgcagaaggctgcacctgcatgtgaatctagcaaactaccgctctgcatttccctctccttgtctagcagcaggactcagggccacacccccgcgggctcgtattccttcattcccacatctcttcaatcggctccaggatgccacctgctgaagtcagaagcccttctgctatcaggtgccattgaggagcatcactccatcctcaacagcaccagctatggacctaaaggtttcagggattctatgaccccaccgtctctcacaaagttgtccaagtttcctactctacatctaccagctccacctggctacctctgctcagtagagttatctatgtctcacttgtttaccaatctttggtcaaaagtgtgtttgtggtcctttggttctttctctcccactccctggctccctctttaccttcaaagtcattcagggaatactacagttaagcaagtactgtgccatgccacgggtttccaaaatgaataagacacagccctcaagttgttcaaagtttaatagggaagacaaagacataaaaatgattacataacaaagcagaaaggtagtctaggtactatggtgtcttgaaagagaaataaatatgctctggctgaggcaagaaatgctgacattgtaagggacctagaagagccaaaacagtgttgaaaaagaacaaagttggaagactcatacttcttgatttcaaagattactacaaagctattatagccaaacagtgtggtactggcctgagggtggacatacagatagatggaatagaactgagagtccagaaataatcccacacatctatggttaactgattttttacgagggtatcaagatcatccaatgtgaaaagaatagtcgtttcaacaaatagtgctgggaaagctgagtatcctttcagcaaaagaatgctgctgaatctttgcctcacaccatatgcaaaaattaactcgaaatggattgaagacctacatttttttcctttttttcttttttgtgaagacctaaatttcttagaagaaaccacagagtaaatctttatgattctggatcaggcaatggtatcttagatatctcacacacacacacacacacacacacacacacacacacacacacacacgatataccaacttcagaaaatcaaggacattatcaagaaagtgaaaaggcaacccacccacagaatgggagagaatatttacaaatttcatatctgataaggggtctagtatccagatataaaaagaacttttacaattcaacaacagaaagacaacccaattttaaaatgggcaaaacatttaattctcatttcttcaaagagaatatacaaatcgccagtagcatctgagaaggtgatcaacatattagtcatgcaaggaatgcaaactgtaatcacaatgagataccacttcacacccacgaaaatggctataattaaaaaaggaaaacaagtgtgggagaagatgtggagaaactggattccttacactttgctgtggaaaggtacaacggcacagtcacttcagaaaacagtgtggcactttctcaaaatgttaaacataaattgaccatacggctctttcagttccattccttaggtcccttagatccttttttttttttttttttttttgagacagagtctccctctgtcacccaggctggagtgcagtggtgcaatcttggctcactgcaatctccacctcccaggttcaagccattctcctgtctcagcctcccaagtagctgggattacaggcacgcacgctaccacacccggctaatttttgtatttttattagagacagggtttcgccatgttggccaggctggtcttgaactcctgacctcaggtgatctgcccacctcggcctcccaacgtgctgggattacgggcatgagccaccacgcctggcctttaggtacatattgaagagaactgaaaacatgttcacacgaaaaattgtacatgaatgttcacagcattattcaaaattagaaagtagaaataactcaaacgtccaatagacgaatgaataaacaaaatgtggtctatccatatgatggaatgttactcagccacaaaaaggaatggagtgctgacacatgccccaccatgcacatgccctgaaaacactacgctaagtgaagaaagccaagcacaagatgtcccacatgccatatgattctaggtatgcaaaatgtcaggaggggcaaatctatagagacagaaagtaggctaatggttgtcaggggaatgtagaatgactgctgagaggtacggggtttctttttggggtaatgaagatgttctggaattagatggtggtggtggtttcatgacattgtggatatactaaaaacaactaaattgtacactttatttatttatttataaaatagagtctcactctgtcacccaggctggagtgcagtgctgcaatcttggctcactacaacctcggcctcccaggttcaagagattctcctacctcagcctcctgagtagctgggactataggtgtgtgccatcatgtccagcaaattttttgtgtttttaatagagacagggtcccaccatgctggcctcgaactcctaacctcagatgatttgcactcctcagcctcccaaaggagtgagccactgctcctggccaactgtatactttaaaagggtgaattctgtggtatatgaattatacctcaggtttttaaatggggacagacatttgaacttgatcttaaaggacgtgctccttgggcagacgatagcaggaagaaaattctgggcagaaagaataaaatgagaaaaggcatggaagccgcaaaagagcaatatgcattcagggaagtaaacatggctgcgactggagaacagggcacatactccggagtgagcggcagaaactgacctagcagtggagtaaagagatagataatgaaagctctatatgccaaccaaggaagaggccatgggatgccttccatgagaatgaggtctcccaggaaaatgacttaaccaagttgccaggctcaatccctcttgtcaaggaagtctccttccgtcaactcagaatcatccaatgactacactccactttggccagccaacagtccttctggaatcatccaatgactacactccactttggccagccaacagtccttctggaaatatccaacgactacactccactttggccagccaacagtccttctggaatcatccaacaactacactccactttggccagccaacagtccttctggaatcatccaacgactacactccactttggccagccaacagtccttctggaaatatccaacgactacactccactttggccagccaacagtccttctgacatttataagatacacttatttacagtattggttgttctcagttttcttcccagcagggtatagactccttgaggacagtctcgtttccaatcttaactctgtcagtccaagtacaggagtagcctgaggagcccctgggatgttgaatgagattggcagtttgaaccaagctctttagcttccctaacctctctttactcatgttttcaccctgtttgaactgccctactaatcacaaactcattcagaatttcgccctcatctgtttcaaacaccacttccttacgagggccttctttgcctccccacctggatatgaactcctccctctttaaaaagggtgtattttgtacttttcttatggcactgatttcctcatctcttatattaaagttactgggtattgctgtcatcttacacatctcttgccctcagctactggaatctaaacaccttagccaagggtttatgcctttctgagccttgcagctcccagcactgtgctgggcagggtctgaactgaactgtttaaccagcagcaaaaatgatagaatcagagacagaaataaccattatcacaaaagtttttttaaatcctagaagaaactacacaaaacaggatgcaggcatcaagaacacagaatgtgtgttgaatcaatttgtgaccacttggcttgtttatttccatcacatggattttattttgctagaactccagaagactcagacaaaaagtaatggcctcccagctgctgcgttcccaagtctgtggttttcctatgatataaacaaaggactctggaggcacggtctctgttcgtatttgctggtgtgggcacggggcagaagtggagggtgggacggggcagggtttgagggaaatccaccgaacgaaccgacagttcgtataagcaacacttgcagtgttaaaccccttccaaccgtgattttattgaaaaaaaaaaatcccactcttcctttggtgaatgtgaaaattctttcggcagctgcattccgatctgaagtgtgtggcagttcaggagagatggcagctggcacagatcccactcaggatgtagagaatgcttaccagcagcgaggggatcatgagagctggcaaaacgaatcctctaagcagatggactggcctcactttgcctgctcagagtgttctcctgtgaatgctgagaatactggaagtacccatcagcaccggactgctgaaaagatcagctttttgaataaaactgtgacatcagctattttaggacttgccacttcagttcataaaaccctaaagcctacattttggttttaatcttatttttgttaaatatttacaatctactgcaaaaccaaattcagaccaaatgtctgcttacacaaccttgtgacatggtcattcctcctgacaagagggagagggaactaacatttaatgagcatttactatgtgcctggcactagacccgcccgttccatgtttcatcctcacagcaatgctgggaggcagagatccacagttcacttggggtatgtgggcccagatgatgtcacgttggcccagacaggtgaatcatttgctcaacaccccaaaggaaaccctggaggagttaggtctgtctgactctaaagttagtgttcctcccactgccctctggtactggccagtataacctagataaattgtttctccagaatttgctacaagagcctatgactctagagcagacattggcaaactttttctgtaaagggccagacagtaaatatttaatttttttagctttgtgggctagtctctgttgcaatggctcaattctaccactatattgcaaaaaggcagccatagataatacataaataaaggaacatggctgtattccaataaaactttattttcaaatacaagcagtgggccagatctggttcccaggctctagtttgccaacccctgctctacaaagttctagagttgcagctgcatgttacttgggtttagcataacaaaggcccatttccaacttaattaacaaaaatgaatctcccatattcaagactacaagagagataaaagagggggtgaaagacatggtctgtgcacttacggaattgacattcatttgggaaaaaaaggcataggcacataaaagtcaaaaataggaagatgaggtagcgctcagtaagtgccaaaggaggagacttgagggccaagggctgactgatgggccaccacgatattagaaaaccagagttcacaacctgatcaaatactcttacattggcaccagagctcagaaggagttggaaaaacctctcagtgggcaagaatgaagaatgagtcagaagttactactttaagcactaatgaaaacacccattctggtgagaccacaccaaggtttttagcatgtgtcagatactaatcaaagataatacgtaaataaaggacatggctgattggtttttaattaacaaaaatgaatctcccatattcaagactacatgagagataaaagaggggtgaaagacatggtctgtgcacttacggaattgacattcatttgggaaaaaaaggcataggcacataaaagccaaaaataggaacatgagaggaacatgaggtagcgctcagtaattaaaaatgatccatctcagctgggcactgtggctcatgcctgtaatcccagcacttggggaggactcggtgggaagactgcttgacgccaggagttcaggaccagcctgggcaacatagcaagactcttagctctacaaaaaatttaaaaagtagttggacacagtggcatgcacctgtggtctcagctacttgggaggctgaggcaggaggactgatgagcccagagggtcaaggctgcagggagtcatggtggcaccactgcactccagcctgagtgacagagagagaccctgtctctaaaaaaatataaataaaccacagacaacatctcctttagactcatcaaacacatttacttcgtctcttttttttttgccatcctccaatactgtgatgctctgtctcattctaaaaggacaagcaactgaactgacgcaggtgcgacactaactgagtgctttcaggaactccggggcctctccattctcctcagctgatcctttacgctccgatgagcctggagaagctacagacaagggccagtagaagccaccttgggctgctctcgttagtttgtaggatgccatttcccaagaccttaccttgctcatggcagtcagggcaggatcacaggcagcatccagatcctgaaccagcagctgaatactgctggagatgacgctgcaaatcaaacaaatcactgtggtcaccctttcaaacaacggccgtctgaatgactgacactcaggcccctgtgtaaaaatcagattcatcatttcactggcaaagtttgagctttaattaatgacagcggaggaacagcttggctctttcttcatgtcctggttttatctgggtgtgtcctcacccagtcaggatatagaatcccacggtcagtctccctaatcaccaccccagtatccctgttcacatcttcctcccaaagaacctgcttcccaaaaatgtttaagtcagaactgaagaaaataaaaagctaagaaaagtggaggaaataaactaagaagagaattttgattcttcgtcaataagtggttgatgtgaaagctgagaattttgattcttcgtcaataagtggttgatgtgaaagctgagaattttgattcttcgtcaataagtggttgatgtgaaagctgaggcctggcccatgcctgtctcatttaatggcagtggaacagaaactgaccacaacaaaaataccacaaggtcctaacagggaaagaagactttactgttagaacttcctggacggacctcccctgccactcccacactcttattccctcggtggctaaatttaagccatttatactttatactttaaaacactgaaggtaggcctggccttctgtgggtttaggtgggggcagatcagcaatggccaagggagaatgtcttctctgtggttattcttcacagtgagacaatgaagaccccataagctaaaagagcaactgcatctgaggaggtacaatggcagcccagttctgaagcttcttcttagtggccagtagggactcattctgacccaacagaaacctcttaggttctgtagtgactaaagccaacagcctgaggcacgctgctgtgtagtggagaaagggcaggcagcgagcaagtgtgtacaaggtatatacgtgccgcacgctgctgtgtagtggagaaagggcaggcagtgagcaagcgtgtacaaggtatatacgtgccgcacgctgctgtgtagtggagaaagggcaggcagtgagcaagcgtgtacaaggtatatacgtgccacatgctgctgtgtagtggagaaagggcaggcagcgagcaagtgtgtacaaggtatatacgtgccacatgctgctgtgtagtggagaaagggcaggcagtgagcaagcgtgtacaaggtatatacgtgccgcacgctgctgtgtagtggagaaagggcaggcagtgagcaagcgtgtacaaggtatatacgtgccacatgctgctgtgtagtggagaaagggcaggcagcgagcaagcgtgtgcagggtacatacgtgctgcacgctgctgtgtagtggagaaagggcaggcagccagtaagtgtgtgcagggtacatacgtgctgaacgtgtccatctctccagtcagattgattcgttcaatcagacttacatccactttttctttgagtttttcttctagctgttgaaaaacagaagaaatggatgcacggttaatgattatccaaagaagtaccatcacaataatagttaacatttactgcgtttgatgattcaggcataattccatacactttttttttttttttttttgagactcgctcttgttgcctaggctggagtgcagtggtgcgacctcggctcactgcatcctctgcctcctgggttcaagcaattctcctgcctcagcctcccgagtagctgggactacaggcgtgcgctaccacacccggctaattttatatttttagtagagatggggtttcaccatgttggtcaggccggtctcaaactcccaacctcaggtgacctgcctgccttggcctcccaaagtgctgagattacaagtgtgagccactgtgcctggccaatcttacaaccttatgaggaagattctattattatcatcgtcattttacagatcagaaaaatagagggggggcctacccaagatagaagtggtagggccaggaatcaaacttcctccagagcctgtgccctttagcactgtgcagtacttgtttcttaccacacatcaataattcacatcaactcattctgaaaagacgctgattttaagatactccctgccccatgaactacagacttgcccacccacaatggaaacctttggtgttgagtagcagtaaaaccagctaaaatagtcagtgaatgctactacgggccaagcacctcattaaggcattggggatacagtggtaaacaaaagaaatgtggtccctgccatcatcagccgacagccggggacagaaacactcaacacgctcctggcgctcaaagaaaaataacgggaccaagacttgtaaatacttggagatatccctgggagttgattaatctagcactgtaaacctattacacaaactctaagaatagctaatgttttggcctttttttttgagacggagtttcactcttgttgcccaggctggagtgcaatggtacgatcttggctcactgcaacctctgcctccagggtttaagtgattctcctgcctcagcctcccgagtagctgggactacaggcgtgcatcaccatgtccggctaatttcgtatttttagtagagacggggtttcaccatatcagccaggatggtcttgaactcctgacctcaggtgatccacccacctccgtgtcccaaagcactgagtagctgggactacagctgggattacaggtgtgagccaccgtgccaggacagaataaccaatgttttgtcttaaatttgaaaatgctgttggggtgcataaattagcataaactttttggaaggcaatttattcaaaaagcaaaactttaaatacacatattgcctaaaccagcaatttcacaactagaaatgcatttcaatgaaataaggagaataacatacaaagatatgcaagtattttttgcagcattcattaattcaaccaatatttaatgagagcccgctttgttcaggctgtgtaacagaataagagagttatttagtgaacaaaacagatcaatactgttctcataaagctggaaacaatctacatgtgtatttacaaaggataaaacaaattatggcacaggcttatcatgcttaaactcttcagcagcctcttcctatgacaccgaaaataaaatccaaattcctaaccatgaattgggtcctgcccagctttctggccccgtcttgccactttccaccttgcctgctaggcttcagttacactggccttttaaatttctgggagacaccagggtccttcgccctcaggaccttcatacttcacacttccttattcctctccctgaaacatggcctgctcagccctgctgacccactgccttgctttgccgcacccccactttctaagccctccaggctcctcactttttggccacatgttggccatgctggtctcaaactcctgacctcgtgatctacccgcctcagcctcccaaagtgctgggattacagacgtgagccaccacgcccggccctaatttttgtatttttagtagagacgggggttttactatgttggccaggctggtctcgaactcctgacctcaggtgatccacccacctcggcctcccaaagtgctgggattacaggcgtgagcccctgcactcggccagagtatcattctttatacctcctaatggaataatggatctgggctttgagcatcagaggctgctgacatcacacaaagagcaaccaaacattatgtatcttgatgacagacgtacaaaacatcattatgatgtagttttctgtaaaaaagaatctgaatcagctcaggcttctacatctaactaccaatttatgggaaatacgagacaaagtaaaatgtccattaatactcgtgggtgcaatcaggaaaatccaaaacttgggaaaatctacagggcaaacaacacagtttctttaagaaaagattgcagagggggcaaagggaaatggaagaagaaaccagagacttaataatctgagcaggctggacccagtggctcacccggtaatcccaactctttgggggctgaggcaagaagatcacttgagcccaggagctcaagaccagcctgagcaacacagtgagaccctatctctacaaaaaataaaaaaatactggccaggcatggtggcaggtgcctgaagtcccagtgtagtcccagccacttgggaggctgagggtaggatcgctttcgttccaggtttcagtgagctgtgatcaaaccaccgcactccagcctgggcaacagattgagaccccatattaaacaaaaagaatctgagcaacaaggaattggaaaataaaatttaaaagcaacaccaataatacatcattattggttcattaattgtaacaaatatttcatatcaatgttaataatatgggaaactgggtaagtggtatatgggaaccatacaaacgatctttgcaatttttctgtaaatgtaaaagtatccttaaaagtgtagtttatgttttttaaaaactatttacaatagcaattcataacatcgttctgtggtttgattgtgttctccaaagtttatgggttataagcttaatccctgaagccacagtgttgagaggtatgaggtcatgagggctctggcatcatcatgggttaatgccattatctcaggagtgggctcttttattccttcaagagatctttattaagcacttattacgtaccaggcattgtatttggtgctaatgaacagaggtgaacaaagtagactttctggcatgtaacttaaaactaatgggggcgccagataataaggaagtaagccagccgagacgtaacttcggttttgtggtgttaggaaataaatttggcagtgctggaataagggagctacctactgaaggggggtggccaggagggcctctctgctgaaggggggtggccaggaggggctctctgaggaggtgatactgaagcggggacctgaggcttggggaatgagactgccaagtgagaagccaccacacccggctaatttttgtattcttttagtagagacggggttttgccatgttgacgagactggtcttaaactcctgacctcaagtgatccaccctcctcagcctcccaaagtgctgggattataggcatgagccaccgcgcccccactcttctggaagctctgaggaaaaaactatttacacctctcttctagctttgggtgtttgctggcaatccttgatgttccttggctcatagaagtctgactccagcctctgcctccttctcacggccttcttccctgtatctctgtgtgttcaatctctctctcctttctaaggacaacagtcattagataaggccccccaccaatcctaaatccaggaccatctcatcttgagatacttaattacatttaccaagataaagtcacatttacatgtcccaaggcctaggacttggacatattttggggttggggggacacttcaacccactatatctccctgggtcctcttgagatgacactaatagtctttgatatttttcttgctttttgtgtaacatgatgttctgattcatcttgtagatttcctgcccttgacctggaattagtcatttctccaggaatctctggtttcttttagtggaaaattgtatttagagatcacaataaaggtgctaagaatgtattacttttgtaatcaataaaaacaattttcactaaataaaaaataattggccacttgtatcatcagtcatcaaaatggtcttcaacttatttctagaacttctaagagtctgttctagaaaactaatgcaaaacatttaagatgctatattcagaaagacattctttgtaaggattatctttttttttttttttttttttagagacagggtctcactctgtcacccaggctggagtgcagtggtgtgatcatagctcactgcagctttgacctcccaggctcaagcgatcctccaacctcagcttcccaagtagctgagaccacaggcatgtaccaccacactcaactaacttttaaattttttgtaaagaccaggtctcactatgttacccaggctggtcttggactattggcctcaagcgatccttccaccttggcttcccaatatgctaggattacaggcgtgagccactgtaccctgccaggattatctataaaagcaaaattttggctgggcatggtggctcacgcctataatcccagcactttggaaggccaaggtgagtggatcacgaggtcaggagattgagaccatcctggctaacacagtgaaaccccgtctctactaaaaatacaaaaaattagctgtgtgtggtagcgggtgcctgtagtcccagctactcacagtggctcacgtctgtaatcccagcactttgggaggccaagacgggcagatcacaagatcaggagatcgagactatcctggctaacacagtgaaacccggcctctactaaaaataaaaaaaaattagccaggcgtggtgatgggaacccgtagtcccagctactcgcgaggctgaggcaggagaatggcgagaacccggcagggggagcttgcagtgagccgagatcgtgccactgcactccagcctgggtgacagagagagactctgtttcaaaaaaaaagcaaaatttgaagcactataaacaacgatcagggatgcttgctaaataagttatggtacaaggccgggcacaggggctcacacctgtaatcccagcactttgggaggccaaggcaggtggatcacaaggtcaagagttggagatcagcctggccaagatggtgaaaccccatctctactaaaaaaaaaaaaaaaatacaaaaattagccggggatggtgatgggcatctataatcccagctactcaggaggctgaggcagaagaattgcttgaacctgggaggtggaggctgcaatgagccaagatcatggccactgcactccagcctggaagacagagcaagactctgtctcaaaataaataaataaataaataatttatggtatagtcccttaaagagaaatattatgtggccataaacaatgatagtaataatgaccctgtaatgatagttatgattattactatcattataatgacaggagaaatgctaatgctatgtatgacactaacaataaaaggatataacagtgaattaagattgtaacattcaaaactatgtctatgaataacaattgaaaaaataccccaaattgctaatatgattatttgaggatgatgggattaaaagggatctttatttttttaaatactacggttattttacctttaaaatagcatatttacatgtatcgtatttctttctgtgcacacccaaaatagttaaacagtgtttcttcatgaaagaactctggaacccctgccttggaggtccttacagatagtgccatcttacctggggagtggcctggggctaaacggactgctctgtggctccaaggccaaaccctggaaggtcatgaccttcgcaactcaacatgaccaggtccccaggcagagtgtgctgctgcctctgcctctggctggcttatgtgccactgaggggccttggtagacacacttcctatttgacctgctatattgctgccctggcacacaggagctccaagctgggctgtctgaactatcatttatgactgtcttcttgtggtctaggcatctgtaaattataaatacaaagtgggtagaagagcagaacctttccaaattactttctttctcttggcctcaggggaatcccagaccaagtgtgaaaaggacttctaattccatgtttaaggctgaatcaaaggttattctgggtcttccttctgctccatcagttgctgaactatggccatgtgggggcctccagcagaggcatcaccctttcctgtcccccagttcctaaacgtcagcatcccaaacaatggctatttgttgaggcagattgaaaatgccatgtaaatttcagaagacacataaaagcccaaaggattctgcttaacttagtaacacttctgagcatggaataactggctgtgactcatcatcaccaaaggctgggtcctagcacagacaagcttgttactgcttttctcatatgggttggagtgctactgacctacttttaacaggtcatgccctttgaggagcttacacaactccagggaggtgaccagtcatactttcttgcccagtcttcttttaacaaggcctttctgtaagacagctgcctgggcagccttatggctggacactgagctttcctctgtggcaggccaactggtctgacccaaggttgtctgtggccatgttaggacgtatattcttactcgccgagcgacgcagcccagagggttcaggaaaaggaggtggtgagtgggcagccaggatggctcacctgctgggtggtggccagacagtactctgccgtgctcaggatgttacagatgaggcagagctcctccagagtgaacttggctacttctgagccctccttttccttgaggaggctgctgatagtcagtcctccactgctggttgtggttctgaagaaaaggaacaggaacaagtcagcatggaatttctaatttgcttcctgaactggaaactacattattttaagatacagaaaagggggaagtaaaggctggacatggcccaaatcaattcacatacaatgagtccttttcctactgaccttaccttgacaccgtcagaaataggaagagatgattcctattttagttaatctgaatcatcagcaggccattagtcacattaactaggatggtctaatatccaaagggaaggctgctgagctgtcctctctttagcttggaatctcctgatgtgcagaactcatttaggaccgtgtggagcacgaaagatggttacctaccctgtttctttcagttaagaaaagtctgcactgggactcatgtgtgctggtggaggaggacataagcgcatgttaagagaagtctgcactggaactcatgtgtgtttgtggaggaggacataagtgaatgttaagaaaagtctgcactgggactcgtgtgtgctggtggaggaggatataagcgaatgttaagagaagtctgcaaggggactcatgtgtgcttgtggaggaggacataagcgaatgttaagacatgcttcctgcccaaggccctaagtgtctcaagaggccaacacccatcacacatcctcctgtgactacaggttttggggcagccccagctactgagtgagttctatggtagtaaccactacccactcatatctggatgctttggaatcctctgttggctcctttcaccttgcccccacttctgtgaacagtctctctactgacataatcccagctgagtatgccatttttttctgctgagatgctgactaatacacgtgggaaaatgctcccacgatgaagttaaacggtagctgcagggaataaagctataagcagtatagccccaattccgtgacacaaacaaacaaaagcacacagatcacacacattaggtatctatcaagaacggaaaaatatatacaaaaagttacgttctctttgggtagtgggattatacataatttatttatttatttatttattttttagggcggagtctccctgcaatgcccaggctggagtgcaatggcacaatctcggctcagcgcaacctccgcctcccgggttcaagtgattctcctgcctcagcctcccgagcagccgggactacaggcatgcaccaccacacccagctgatttttgtatttttagtagagatggggtttcaccatattagccaggctggtctcaaactcctgacctcaagtgatcctcctgcctcggctgcccccaatcctaccgcatcttcaaacattaggctatgtccagttctaatgcctcaggataacacaatagtccccataattaggagctatgcagtagctgacccccaatcctaccgcatctgaaacattaggctctgtccagcatggcaggaagtgtgcaccacaagagggacttggaacctactgggaatgaggaaaaagcagattcattcctccaacccatcactccggggcatcatctcaccaaaagaggcttgggtgaaactgcttaagctatttatcagttatttccaccacaacctcactttttttgtatgtgccaagtatctatagctgaatccatgaaaattaaataggcatacaatgggattggttctcgagtccaccgtggtaagatttgcccacgtgggcagtcagtgtggacatttcctctgatggtcttgatcagctgtggaatgtcagagaggaaatagcttcaggccctcgggaactcaggaagcgtgctttcctccttgatactcttggtggtttagtaaacaacttcagagtggatttccttaagattcccatatttaggtctatttgccaccactcagactatgaagaacaggactcacttgggcaggttgccagagaggattttccaggcgtattctcggaggtacttctggaaaatggtggtcagggcgatcatgggctccccagtactgagctgagagcattgcaccatgcacttcttgtagtagacaaagaggtcggcgcagctggggagcacggcacccccttcatcagtgttgggcttaggtggcccctgggctttgaaatcagccacaaaccgatctatcagctctccgaggttcctaggaggaaaaaaaaaaaccaaaaatgttattttacttcaagaaaagtaaagcaaatgtgctcgtttgcaatgtacataaactactgccacaagtaatcattcctactgcatttaaaacttaaaatcggatcgattttaatcaatatcatcattcactaccaccaccactcctacaacagcagtaataaaatctgacatatgagattctaatctctaagtcgattgacatttgtgctttatacttttcaaggcatttcattatcatattggactccaaacccctgtaagcaagatagggtattactggtcccgctaaaagatgagaaaattaagtcctagaaagtttctcacaaagtctgtggcagagctgagcctagactccaatactaaagtaagaaactaatccttctatcatattagtactgtttacccctccaaaaaggaaaaccctaaatcatgatagtgatcgttttctgaacacttgagatgcaccaggtattatgtccatgctttatacccatctcactgaacttcatttcctttttttttttttttttttttttttgagacagagtcttgctctgttggcccaggctggagtgcagcggcatgatcttggcccactgcaacctccatcttcagggttcaagcaattctcctgcgtcagcctcccatgtagctgggactacaggcacacgccaccatgcccagctaacttttattttcagtagagacagggtttcaccatgttgcccaggctggtctcgacatcctgacctcaggtgatccacccaccttggcctcccaaagtgctgggattacaggtgtgagccactcactgcgcccagctcatttactttttacaataaacttacatagtatgtattattactatcctcattttcaaagagttaagtacagaaaagttgagtaccttgtccagagtaatacagcaagaaaacaggagagccacgattaaaaactaagcagcctggctctaagcttcaagcctttaagcactctacttcctaaaaacaaaaaggttatgatgtcagcacatatttagacatcacgaacctaaatgtgcccaagagacagatgcctaaacaaagagaaactgtgaaatgtgttataatggtttctttctcctccgatttagttttttcttagaacttccagaatcaaaggtttaaaaaaatcttaggaaaagagagggtacgggcagagtgtggtggctcaagcctgtaatcccagcactgtgggaggccgaggcgggcagatcacttgaggacaggagttcgagaccagcctggccaacatggcaaaaccccgtctctactaaaaatacaaaaattagccgggtgtgggccgggtgcggtggctcatgcctgtaatcccaacactttgggaggcccaggcggcggatcacttgaggccaggagttcgagaccagcctggccaacatggcaaaaccccgtctctactaaaaatacaaaaattagcgtggtgtgggccaggcacagtggctcatgcctgtaatcccagcactttgggaggccaaggcaggcggatcacaaggtcaggagatcaagaccatcctaacacgttgaaaccccgtctctactaaaaatacaaaaaaaaaattagccgggcatgatggcgggtgcccgtagtcccagctacttcagaggctgaggcaggagaatggcatgaacccgggaggcggagcttgcagtgagctgagactgcaccactgccctccagcctgggcaacaaagtgagactctgtctcagaaaaaaaaaaaaaaaaaaaattagctgggggtggtggcgcatgcctgtaatcccagctacttggaaggctgagacctgaggcagagaatcacttgaactcaggaggcggaggttgctgtgagcccagctcacaccactgcattccagcctgggcaacagagcaagacttgatatctggaaaaaaaaaacaaaaaccaaaacagggtatgagcagctccagacttgcctcaggccacagtggggatgagagttgcaatttttctccgatttcccattcaaacatccctgtaattgttccgttgaattgtgtcatcacctgtgaggatccagcagagctgcagtaactgctgcctgcacagctgtgctgtgtgaagaatgggaagggttcccaccactcctgacatgttgcatctttttaggttgccgtttaaggctataggaatccagctgtgttttaaaaatgtatttatataatggtaaggaagaaaaagacaagaaccacacataccaccaattagcaggaataggagaaaattgacattttactcaaaggcttttgttattgaaagtctattataggcccaacgtgggggctcacacctgtaatcccagcactttgggaagccggggcgggtggatcacctgtggtcgggagtttgagaccagcctgaccaacatagagaaaccccgtcttcactaaaaacacaaaaaattagccaggcgtggtggcgggtgcctgtaatcccagctactcgggaggctgaggtaggagaatcacttgaacctgggaggcggaagttgcagtgagccgagatcgtaccattgcactacagcctgggcaacaagagcgaaaccccatctcaaaaaaaaaaaaaaaaaaaaaaagaaagaaaagaaaaagaaagtctattatatccagatacaaccactctgccctcaaagagcttctggcctaggctaagtctctgtctgtggtgatagtgagaaagcagggaaggatctcgttggttgacctcggaaagcttcatggccaccactcttgttcctcataacctctcttgcctcactttcccactgaatctcccacctctcctccacagctgacccaacactccagccagaggttcctcgcaacagctcccctgctggcctactcccggtcagtgggcctcgcaacggctcccctgctggcctactcccggtcactgggcctgtgtgacgtcctggccaaaacgctctcccaccacctgtccactcccctttcaagctcatccaggtctcacccgcagcagctgcaacttctgtcatctgccacccaccaacactttatttaacactttattagacagtgcgaggatgccatatattcaagaaataaccggccgggcgcggtggctcacgcctgtaatcccagcactttgggaggccgaggcgggcggatcacgaggtcaggagatcgagaccatcccggctaaaacggtgaaaccccgtctctactaaaaatacaaaaaaattagccaggcgtagtggcgggcgcctgtagtcccagctacttgggaggctgaggcaggagaatggcgtgaacccgggaggcggagcttgcagtgagccgagatcccgccactgcactccagcctgggcgacagagcgagactccgtctcaaaaaaaaaaaaaaaaaaagaaagaaataacctatcttctcccatcctgggccacggtaggcaatgctaatcaacaaggagccctttcttcactgatctctcttgtgattccagaatccttcttgagacagcactccagccagtcacctctatcaactgaagttggtacaaaaggcgaaggaggtagaatcatctgtttcgtgcctgttaacacaagctccctgagaggaggaatgacgtttatgctggttctgctgcccccggcccgcccgtcatgccaatgagtggagtgaagcttcatgctagtgctcgatacatacttacctgatcaacctccacactttgttcctaggggatgggaatggagggtgggaaggtggaaacgggatggaggccggtgcagtggaggagaacatggaacagaaggcaaaagattcccctggggtcttcttatgagattctaatctctaaattgatagtgccaaccaaatcagggaccagagctctgacatgggtgttttttttgtttttttttgtttttgttttttgctttttttggagacggagtctcactcagttgtccaggctggagtgcagtggtttgatctcagctcactgcaacctctgcctcccgggttcaagtgattctactgcctcagcttcctgagtagctgggactaccggcacacaccaccacaaccggctaatttttgcttttttttttagtagagatggggtttcaccatcttggccaggctggtcttgaactcctgacctagtgatcgcccgcctcagcctcccaaagtgctgggattacaggcgtgagccactgcgcccagccgactctgatgtgcttccaggcgtgagccaacgcgccagccaactctgatgtgattctattttcatcactcacctgttcccctagaagatggatacttacttacttgcttcctatttcagagccaccccaatgagtaagattataaactaattatgatcatacagcataaagaaaatgttcacttcaaaaagctctaaagatctatactttgtagaatgtctacaggatgtctactcggttacttctgacattgttctttcaagtggatgagaaataaaccagttggggaaaccttcccctgccttccatctttcaccctgcatcagcatgctttgatgccacatgagacattagaaaatcagtagccagtatttcacagaacagaagaatgtaagttaccccaatgggaatgcgtaaggctcattagttttgaatacatgatccaatctgatcacatttcttttttttttttttgagacagagtattgctttgtcacccaggacaaagtgcagtggcatgatcatggctcactgcagcctcaacctcccaggctcaagcaattctcctgcctcagcctcccaagtagctgggactacaggcgtccatcaccatgcatggctaggaggaggccaggagtttgagaatagtgtgggcaacaaagtaagatccctatctctaaaaaaaaataaacaaattagttaggcatggtggtgtgtgcttgtagttacagttacttgggaggctgagggaggacgatcatttgagcccaggagtttgaggttacagtgagctataatgccaccactgcactccagcctggacaacagagcaagacattgtcgaaggggaggggaggggaggggaggggaagggagaaggaaggaaatacctccttcccgaaatactgctgggagttccactgataaattacatgccctaggaatgaagacagttgcagagtggtatcagtagagggaaaaactaaagtgaggagaaaaaatatgccattgcagactgggtttatccatggatggccaaggccatttctctggtgggcctgcagtcagcattcacagaaacaatattctaattggaatgtcaagcagtgaggcacagggagagaaagacagtagccagaagatggcaacgcaggtgagcaaggtcaaggcagctgaagatccccattaagttagataacttatttatttatttttttatttttttgagacagggtcacccaggctggagtgcagtggcatgaccacagcttactgcaacttctgcctcccaggctccagcaatcctcccaccccagcctcctgagtagctgggactacaggtgcacaccaccacacctggttaatttttgtgggcttttttttgtagagacagggttttgtcatgtcacccaggctggtctcgaactcctgagctcaagccatccacctgcctcagcctcccagggtgctgggattacaggcacgagcaaccatgcccgaccctagagcttcttaattcaagggtactcccactaatttgcatcccttcctcttcctttttgctggggctgaggatgttgctctggtgtggccagtggggctggggagccaaggtgtggcttgagcacagctgggagatgggttacatacaggcaaactgagcaaataggtaaatatactgagcatgctaggacccaaatttctcactgttgtagaaggcagttgccaacgttgaatgggagaggctaaaataaaccctgtggtgtgagattagaattgaaggcatcagcatcaaatgcacaggttctaatatagaagcaggtgcacacacagctatagaggcatatatgtagaagcaggtgcacacacagctatagagacatatacacgtatgtttatacacacatacatttcttagctctctcagccaaggcaatctggaagcaatgacaccgagcagcaatgagcatacttggtttctaaatgtcatcctccaccaaaggaacaagaaatgcctggggaaatggacgactccagggctgggatacaaaagtacaggataagcctagtatattttattgtgccagagaggaaggaggtgctcaaaaaatgatagtggcatgtaaaaaggatgaagagccagctttaagaggctcccactggccaagtcagggacaatttgagtactaaaataacaacgacaaatcctggaaggaaaaacagacactaatggaaaaactggtgaagttcaaacacggtgtgcaggttattaaatagtaatgtaccaatgttaacttgccagttttgacaactctgctgtggttatataagatgtcaacatcaggggaagttgggtgaaggggaacataagaaatctgtactatttgtgaaattttcctataggtatacatttattccaaaatacagtaaaaataaaagagatagtgatgcctacaacctactgaataaaatataaaaatccatgagtccatgctgacatagacataagggggagaagtgacagcttttcttaaagtagaatgccaactgataaacgcagaagaaatgatgtagctagaaaaatcaccatttgactgggcgcggcagctcatgcctgtaatctcaacatctagggaggccgaggtgggcagatcacttgaggtcaggagttccaaaccagcctggccaacatggtgaaaccccgtctctactaaaaatacaaaaaaattagctgggcatggtggcgagcatctataatcccagctacttgggaggctgaggcaggagaatcacttgaacccaggagccgagattatgtcactgcactccagcctgggcgacagagcaagactctgcctcaaaaaaaaaaaaaagaagaaaaatcatcattgtcaatcatcttagtaataaattacatgataagtgaaagatgaggaaaaggatattgataaagtttcaaggtttctcccaacacttattaataaatagagatacccagtagagacaacatctacaccaagtaataaaaacgaacatcataggctggccgtggtagctcacgcctgtaatctcagcactttgggaggccaaggcgggtggatcacctgaagtcaggagttcaagaccatcctgaccaacatggcaaaaccctgtctctactaaaaaaaagacaaaaattagctgggtgcagtggcgggtacctgtaatcccagctactcaggaggctgaggcaggagaattgcttgagcccaggaggtggaggttgcagtgagtggagatcgcaccactgcactccagcctggggaatagagtgaaacgactctgtctcaaaaaaaaaaaaaaaaaaaaaaagaacatcacatcacaagttttgggataaactggcattctgtgcctcctgatatgaattcctaggaacacaggaccacttctgcataaatcataaataatgaggaaacatcagacaaacccaaactgagggaaattccagaaagtaattggccaatcctcttcaaaaatgtcaaggtcatgaaagacaaagaaagactcaattagtcttctgggttgaaggagaccaaagagacatgacaactaaatgcaacctgtgatcctagagctatttaaacaaacaaacaacctgcgatctgagagctattcaaacaaataaactaacaacctgtgatcctagggctattcaaacaggccaacaaacaagcagattgggacaactgctgaaatgtgaggaggagagcatggatgaagcagtaatactgtatcactgtgaattccctgatgttgatagctgtactgtggttatgtgaggggtctgggattaagcagtaatgttgtatcaacgttaatttcctgatgtggacagttgtactgtggttatgtagaaaccttgtttctaagaaatatatattgaagtattaaggagtagtggcgaatcttgtctgcaacttgagaattcaaaggttcaggaaaaaagtacaggttgggcacagtggttcacgtctgtaatctcaacactttgggaggccagcagatcacttgagcccaggagtttgagaccagcccgagcaacatggtgagaccctgtctctacaaaaaaacaaaaattagactgatgtgatggcctgtgcctgtagtctcagttactctagaggctgaagtaggaggaggggaagggagaggaagggaggggaggggtggggaggggagggagaagagaaagggaaagagagaaaaagaaaaagaaggaagagaaaaaagaaaaggaaaatgcatgcagtgtctgtgcattacgtgtgtgggggagataactattaatgaggaatctggatgaaggctatacaagggctctttgtataattcttataattcttctgtaagcttgaaattaattcaaaataaacaacaatgggctctccctctccctctccttctccctctccctctccctacagtctccctctccctctccctacggtctccctctccccacggtctccctctccctctctttccacggtctccctctgatgccgagccgaagctggactgtgctgctgccatcttggctcactgcaacctccctgcctgattctcctgcctcagcctgccgagtgcctgcgattgcaggcgcgcgctgccatgcctgactggttttcgtatttttttggtggagacggggtttcgctgtgttggccgggctggtctccagctcctaaccgcgagtgatccgccagcctcggcctcccgaggtgccgggattgcagacggtgtctggttcactcagtgctcaatggtgcccaggctggagtgcaggggcgtgatctcggctcgctacaacctccacctcccagccgcctgccttggcctcccaaagtgcccagagtgcagcctctgcccggccgccaccccgtctaggaagtgaggagcgtctctgcctggccgcccatcgtctgggatgtgaggagcccctctgcctggctgcccagtccggaaagtgaggagcgtctctgcccggcccccatcccatctaggaagtgaggagcgcctcttcccggccgccatcccatctaggaagtgaggagcgtctctgcccggccgcccatcgtctgagatgtggggagcgcctttgccccgccgccccgtctgggatgtgaggagcgcctctgcccggccgcgaccccgtctgggaggtgaggagcgtctctgcccagccgccccatctgagaagggaggagaccctctgcccggcaaccgccccgtctgagaagtgaggagcccctccgcccggcagccgccccgtctgagaagtgaggagcgtctccgccgggcagccaccccgtccgggagggaggtgggggggtcagccccccgcccggccagccgccccatccgggaggtgaggggcgcctctgcccggccgcccctactgggaagtgaggagcccctctgcccagcgcgtctgggacgtgtgcccaagagcttattgagaacgggccatgatgacaatggcggttttgtggaatagaaaggcgggaaaggtggggaaaagattgagaaatcggatggttgccgtgtctgtgtggaaagaagtagacatgggaaacttttcattttgttctgtaccaagaaaaattcttctgccttgggatcctgttgatctgtgaccttacccccaaccctgtgctctctgaagcatgtgctgtgaccactcagggttaaatggattaagggcagtgcaagatgtgctttgttaaacagatgcttgaaggcagcatgctcgttaagagtcatcaccactccctaatctcaagtacccagggacacaaacactgcggaaggcctcagggtcctctgcctaggaaaaccagagacctttgttcacttgtttatctgctgaccttccctccactattgtcctatgaccctgccaaatccccctctgtgagaaacacccaagaatgatcaataaaaataaaaataaaaataaaataaaataatcaacaatggtaattagtttacagacagatgctaggctctagaaaagcatgagttctagtctaacaaaagttattagagggaactcaggagaatgggcagatatggagtcaccagtaacttccctgatggagaacgccatagaatggggtaaagaaagtgcctatgtagaaatttcttttgcaagagtcagccagaggaaatcactaaatgccaagggtagaagacagactaacctcctctttgaacataaataaaaattgagaaagccatttaaaggatgtaaggacggcttagcccaacctgctagtggccatccccacttcctgcctcctccctgagtactggctctgcagtcctcctactgctacttggcttttggctggggcagatgctgccggaactttcccttggcaggtgggaggctggggagatgagaaggtggaccccatgccaggctcaagagaaatctggccacactgacaaggccacccacccacataggagtcctgaaaaagatgagagggatggcagggcaggcactgttcctgagcaccatttactgtgtgctgaaggtgaaaatgccacctcttctcctcctcgccacaaagtccatgaggtcggccttatgatcctcacagtgtagaggggctagctaggagcatgctcaaggtcccagcctagcaagcgcgaagcctcacatctaggtatgtctgggatcaggcccacgctctttccaccacactgtgttgcgtctctgtcatctgggaagttatgaatggtctcatgctttctgagttagagctacagcaaaagtagtaatgtgcacaaaaccagtccccacctgagttccttctccagcctcaggattctttgaagggaagaagcagttcctagaactccttgaaattacactcaaaatagtgtgtgcatgatatggatttttttgacaagagcgtcgatgctttccattgggttcttaaaaaggatctatgactttaaaatggttaataacgagtgcgttgggcattattttgtctgactatctctcttgacagataaggaaatggagttctttgaactctattttctactttgagttacagtgtttattctgcaggaacagcagcacagcctgcgcagtatctgctccttccttagtgctgcggaaacttcctagtgaggccaaacagcagggtaagtggccagcacttcatttttcacaggaaaatggagagtccccaaggaagggaggcctggctccttgcccaaagtatcatgaacaatgagtatactttgtataaatcaaggccatgtgaaaagagtggatgccagaattacaataactcagaaaaatgaccctttaaaccaggtaggttttgggaaaggatgtggctacctcagacatgtgctttaaaccctgggccttggctgggcgcggtggctcatgcctgtaatcccagcactttgggaggtggaggtgggctgacctcttaagcccaggagttcgagaccagcctgggcaacatggcaaaactgcgtctctacaaaaaatacaaaaattagccaggtgtggtggtgtgtgcctgtagtctcagctacttgagaggctgagtaggaaagactgctgaaacccaggaggttgaggctacagtgagtcctgatcacgcctctgtactccatcttagctgacactgagaccccgtctcaaaaataaataaataaaaataaaccctggacccagtaacttttaagccttttaaaacgaaaaatttgggttaagagaagatggggctttggctgaaaagagtcatccaggggggttcctcaaagacctgtgactctaataggcaaataaccaatcctttttcctgcccctcaggggtgtcttagtaacttcctggaggcaaactgtgaatgtagaagacagggtgctctcaaggacaaagaggcagaagtccccactgtacctcggtgtgcctgctgggcacgtgcccactgggcaagagcaagggcactactgggtctttgcaaggcaaatgacggcaaggcaacttgcctttggtggtgggctgatggggagacttccatttgatgatggagaagctactgggcaagttcattttctgagattttaatatgaagtactttgtaatcgggcatgaaaagcatagaagcagtccataaaatcacgtgagtgaataatacagttccatgtgaagtttctaattgaaacattgtcttactgttacggtttaagaaacatgtttgaaactaagaatgtgctcacccatgatagaagcattaaaaacaaggggaggggtgaagtgcaatcagacctaaatgcgtaaatgcaaccccagagagcctccctaaaaacctaatacgttcccagagaacttccctcagaacctaacgcgttcccagagaacttccctcagaacctcaatgcgttcccagagaatgtccctcagaacctaatgtgttcccagagaatctccctcagaacctaatgcgttcccagagaaccttcctcagaacctcaatgcattcccagagaacttccctcagaacctaatgcattcccagagaaattccctcaggatctaatgtgttccagggaacctccctcagaacctcaatgcgttcccagagaacctcccccagaatctaatgctttcccagagaacctccctcaggacctagtgcgtcccagagaccttccctcagaacctaatgcggtcccagaagacttccctcaggacctaatgcgttcctagaaaactctcagaacctaatgcgttcccagagaacttccctcagaacctaatgcattcgcagcgaacctccctgagaccctaatgcgttcccagagaaattcccttaggacctaaatgtgttcccagagaacttcactcagaacctaatgcattcgcagagaacctccctcagaacctaatgcgttcccagaaaacctccctcacaacctaacgcgttctcagagaacttcactcaggaccaaatgagttccgaaaaaccaccccagaacctcaatgtgttcccagagaacctccctcagaacctaatgagtttccaaagaacctccctcagaacctaatgtgttcacagagaacctccctcaaacctaaatggttcccagagaacctctctcagaacctaatgtgttcccagacaatctgcctcataacctaatgcgttctcagataacttccctgagaacctcaatgcattcccaaagaacttccctcagaacctaacgctttcccagacaacctccctcaggacctaatgcattcccagagaatctccctcagaacctaatgcattgccagagaacctccctcagaacctcaatgcattcccagaaaacatacctcagaacctaatgcattcccagagaatctccctcagcacctaatgtgttcccagagaacctccctcaggagctaatgcattcccacagaacctcctccagcacctaatgcgttcccagagaacctcccacagacctcaatgcattcccagagaacttcccacagaacctaatgtggtcccaaagatcctccctcagaatctaatgcgttcccagaaaaatttcttcagaacctaatgcattcccagagaacctccctcaggacctccatgcgttcccacagaacctccctcagaacccaatacgtgcccagagaacctccctcagaacctcagtgcatttccagagaacctccctcagaacccaatatgtgcccagagaacctccctcagaacctcagtgcattcccagagaacctccctcagaacctaaagcgttcacagagaacctccctcagaacctaatgcgttcccagaaaacctccctcagaacctcaatgctttcctagagaacctccctcagaacctcaatgacttagcagagaacctccctcaggacctcaatgcattcccagaaacctcgctcaggatctagtgcgttcccagagaacctctcagagaacctaaagcattcccagagaacctccctcagaacctaatgtgttcccaaagaacttccctcagacctaatgctttcccagaaaacctccttcagaacctaatgcatttccagagaacttccctcaggacgtcaatgcgttcccagagaacctccctcagaacctaatctttcccagagaacctctgtcagaactcagtgagttcccagagaacctccctcagaaccacaatgcattcctagagaatctcccacagaacctcaatgagttaccacagaacctccctcaggacctcaatgcgttcccagagaacatccctccaaacctaatgcgttaccacagagcctccctcagaacctaatgcgttcccagagaacccccaacagaatctcagtgcattaccagaaaacctccgtcaggacctaatgcggtcccagagaacatccctcagaacctaatgcgttcccagagatcctccctcagaatctaatacgttcgcagagaaactccctcagaacctaatgcattcccaaagaacttcctttaggacctcaatgcgttcccagagaatctccctcacaaagtaatgcatttcgaggcaacctccctcagaacctcagtgcattaccagagaaccttcctaagcacgtaattcattcccagagaacttcccccagaacctaatgcgttcccagagatcctccctcagaatttaatgcgttcccagagaaattccctcagaacctaatgcattcccagagaacctccctcagaatctcagtgcattaccagagaaccaccctcaggacctaatgtggtcccagagaacatccctcagaacctaatgcgttcccaaagatcctccctcaggacctaatgcgttcccaaagatcctccttcagaatctaacacactcacagagaaattccctcagaacataatgcgttcccaaagaacttcccttaggacctcaatgcgttttcagagaacctccctcagaacctaatgcgttcccaggcaacctccctcagaacctcactgcattaccagaaaaccttcctaagcaggtaattctttcccagagaaattccctcagaacctaatgcgttcccaaagaatctccctcagaatctaatgcattcctagagaacatccctcagaacctgatgcgttcccagagatcctccctcagaatttaatgcgttcccagagaaattctctcagaacctaatgcgttcccagagatgctccctcagaatttaatgcgttcccagagaaattctctcagaacctaatgcgttcctagagaacctccctcagaacctcagtgcgtttccagagaagctccctcagaacgtaatgcattcccagacaacttccctcagaacctaattccttcccagagaacctctctcagaacctaatgcattcctagagaacttccctcagaacctaatgcgttcccagagatcctccctcagaatttaatgcgttcccagagaaattccctcagaacctcagtgcgttcccagagaacctccctcagaacctcagtgcgtttccagagaagctccctcagaagccaatgcattcccagacaacttccctgagaacctaattccttcccagagaacctccctcagaacctcagtcaattaccagagaacctccctcagaacctaatgcgatcccagagaacatccctcagaacctaatgcgttcctagagaacccccaacagaatctcagtgcattaccagaaaacctcccgcaggacctaatgcggtcccagagaacatccctcagaacctaatgcgttcccagagaacctccctcagaatggaatgcgtttgtagagaacttccttcagaacctaaggcgttcccaaagatcctccctcagaacctaatgcgttcccagagaacccccaacagaatctcagtgggttaccagaaaacctccctcaggacctaatgcggtcccagagaacctccctcagaacctcagtgcattaccagagaaccttcctcaggacctaatgcggtcccagagaacatccctcagaacctaatgcgttcccagagaacctccctcagaacctaatgcgttcccagagaatctccctcagaacctaatgcgttcccagagaacctccctcagaacctaatgcgttcccagagaacctccctcagaacctaatgtattcctagagaacttccctcagaacctaatgcgttcccagagatcctccctcagaatttaatgcgttcccagagaaattccctcagaacctaatgccttcccagagaacctccctcagaatctcagtgcattaccggagaaccaccctcaggacctaatgtggtcccagagaacatccctcagaacctaatgcgttcccacagaacttccctcagaacctcagtgcgtttccagagaacctccctcacaatctcagtgcattcccagagaacttccctcaggacctcaatgtgttctcagagatcctccctcatgacctaatgtgttcccagagaacctccctcagaacctaatgcattccgagagaacttccctcagaacctaattccttcccagagaacctccctcagaacctcagtgcattaccagagaaccaccctcaggacctaatgcgttctcagagaacctccctcagaacctaattccttcccagagaacctccgtcagaacctgagtgcattaacagagaaccaccctcaggacctaatgcgttcccagggaacctccctcataacctaattccttgccagagaacctccctcagaacctcagtgcattaccagagaaccaccgtcaggacctaatgtggtcccagagaacatccctcagaatctaatgcattcccagagaacccccaacagaatctcagtgggttaccagaaaacctccctcaggacctaatgcggtcccagagaacctccctcagaacctcagtgcattaccagaaaacctccctcaggacctaatgcggtcccagagaacatccctcagaacctaatgcgttcccagagaacctccctcagaacctaatgtgttcccagagaacctccctcagaacctaattccttcccagagaagctccctcaaaacctaatgcattcccagacaacttccctcagaaactaatgcgttcccagagatcctccctcagaatttaatgcgttcccagagaaattccctcagaacctaatgcgttcccagagaacctccctcagaacctcagtgcgtttccagagaacctccctcacaatctcagtgaattcccagagaacttccctcaggacctcaatctgttcccagagatcctccctcaggacctaaggtgttcccagagatcctccctcagaacctaatgcgttcccagagaacctccctcagaacctaatgcattcccagagaacttccctcagaacctaattccttcccagagaacctccctcagaacctcagtgcattgccagagaacctccctcaggacctaatgtgttcccagggaacctccctcagaacctaatgtgttcccagagaacctccctcaggacagaatgcgttcctagagaacttccctcagaacctaatgcgttcccagagatcctccctcagaatctaatgcgttcgcagagaaattccctcagaacctgatgcattaccagagaacttcccttaggacctcaatgcgttcccagagaacctccctcagaacctaatgcattccaagagaacctccctcagaacctaatgcattccaagagaacctccctcagaacctcaacgcattcgcagagatcaagacctctacgcgttcccagagaccctccctcaagacctaatgggtacccagagaacctcccacagaacctaatgcgttcccagataacctccctcagaacttaatgcattcccagagaccttccctcacaacctaatgcgttcccacaggacttcactcaagacctaatgtgttcccagagaacttccctcaggacctaatgcattcccagagaacctccctcaggacctaatgcgtttccagagaacctcccttaaaagctagtgcgttcgcagagaacctccctcagaacctaatgcattcccacagatcttcactcaggacctgatgcgttcccagagaacttccctcaggatctcaattcgtttccagagaacctccctcaggacctcaatgcgttcccagagaacccctctcagaacctaatgggttcccagagaacttccctaagaacctaattcgttcccagagaacctccctgagaaccctgaggtcacagaggaccttcctcagaacctaatgcattcccagagaacttccctcaaaacctaatgcattccctgagaatctccctcagaacataatgcgttcccaaagaagctcccacacaacctactgcgttcccagagaacctccctcagaacctgaatgcattcccagagaacttccctcagaacctaaggcattcccagagaacttccctcagaacctaatgcgttcccagagaacctccctaaggacgtaatgcattcacagaggacttccctcagaacctaatgcatccccggaaaaccttcctcagaacctaatgcgttcctagagaactttcctcagaacttaaatgcgttcccagagatcctccctcagaatctaatgcgttcccacagaaattccctcagaacctactgcgttcccagagaacttcccttaggacctcaatgcgttcccagagaacctccctcagaacctcagtacattcgcagacaacctcccttggaacctcagtgcattcccagataacctccctgaggacctcaatgtgttcccagagaccctccctcagaacctaatgtgttcccagagaacctccttcagaacctaatgcgttcccagagaacctccctcagaatctaatgcattcccagagaacctccctcagaacctcagtgcaatcccagagaacctgccttcaaacctaatgcgttcccagaaaacatccctcaggaactaatgagttccaggagaacttccctcagaacctaatgtgttcccagagaacctccctcagaacctaatgcatcccagagaacatcactcagaacctaatgtgttcccagagaacctccctcagaacctcagtgcattctgagaacctccctcaaaacctcagtgtgttcccagagaacctccctgaggacctaatgcattcccagagaacctccctcagaacccaatgtgtccccagagaacctccctcacaacccagtgcgttcccagagaacctccctcaggacctcaatgcgttcccacagaacttccctcatcatctaatgcattcccaaagaacctccctcagaacctagtgcattcccagagaacatcactcaggacccaatgtgttcccagagaacctccacagaagctcaatgcgttcccagagaacctccttcagacgctaatgtgttcccagggaacttccctcagaacctcaacgcagtcccagagaaactccctcagaccctaacgtgttcccagagaacctcccttagaacccaatgcgttcccagagaacctccctcagaacctaatgcgttccgagataacctccctcagaatctcaatgcgttcccagagaacttctcttagaacctaatgcgtttccagagaacctccctcagaatctccatgcattctcagaggacttccctcagaacctaatgtgttcccagagaacttccctcaggacctaatgcgttcccagagaacttccctcaggacctaatgcgttcccagagaacctccctcaggacctaatgtgtttccagagaacctcccttagaacctaatgcgttcctagagaacttccctcagaatctaaagtgttcccagagaacctccctcagaacctcagtgcattagcagagaacctccctcagaacctaatgcgttcccacagaacttccctcacaacctaatgcgttcccaaagaacttccctcaggacctcaatgcgttcccagagaatctccctcagaacctaatgcgttcccaaagaacttccctcagaacctaatatgttcccagagaacctccctcagaacctcagtgagttcccagagaacctccttcggaacctcagtgcattcccagagaacctccctcagaacctcagtgtgttcccagagaacctccctgaggacataatgcattcccacagaacctccctcagaacctcaatgcgttcccagagaccttccctcacgacctaatgcgttcccagagaacttcccccaggacctaatgcattcccagagacctctctcagaacctcaatgcgttcccagagaaccttcctcaggacctaatgcgttcccagagaacctccctcagaacttcaatacattcccagagaactttcctcagaacctaatgcgttcccagggaacttccatcagaacctaatgcattcccagataacctccctcagaacctgaatgcgttcccaaagaacctccctcagaacctaatgtgttcccggagaacctcactcaggacctcaatgcgttcccagagaactcccttctgaaccaaatgcgttcccagagaatctccctcagaacctaatgggttcccatagaacctccctcagaatctaatgtgttcccagagaacttccctcaggacctcaatgcattcccagagaacctccttcagaacctcaatgcgttcccagagaacttccctcagaacctcaatgcgttcccagagaacctccatcaggacctcatgcgttcccagggaacctccctcagaacctcaatgcattcccagagaacttccctcagtacctaatgcgttcccagggaacctccctcaggacctaatatgttcccagataacttccctcagtacctaatgcattccccaagaagctccctcagaacccaatgtgtttccagagatcttccctcagaacctcagtgtgttcctgaagaacttccctcaggactttcctgcagccgctgttgctctccccatgggagccaccttctggtcccttccgagtgcgttctttagactgtgaggcttcctctgggagcccaggccagtctgtctccagtcatctcgttacaatcatcttgacctttccaaaacctgccttccaacgtggaagggcttggctgcggacaaggacgcagggatgaggaggagtcttcctccttttctaatgccccctcacgcacacaacggacactggagcacgaacacagtcttcggctgttagtttggaagtctttgggatttttttaaaaacagggtgggagggaagaaacctggccgcagtgagatgctttataaaaatatttggaggctacaagtttgtgaaaagcatatagtatattttgtttgcttttcttttctttttttcttttgagacgaagtctctgtcaccaagctgggtggcatagtgacggctaattgcagcctctgcctcctgggctccagtgattttcccacctcagcctctcgagtagctgggactacaggtgtgcatcaccacacctgactagtttttttaaaaaaattatttataaagatgaggtttcagcatgttgcccaggctggtcttgaatcctgggctcaagagctcctcctaccttggcctcccaaagtgctgggattacaggtgtgacccactgtacctggccacgtgaaaagcatatactgtattatatagatgatccataaaataaaatcagaatccatgagttcatactgatatataaacaaataggggagagggaaaattcttccatatagtagaactccaattagtaaatgtagaagaaatgatgaaaatagacaatcgacatttggcaaatgccacagaaacaacgcttccgtcaggaatcaatcaagggatgcgaaatgagtgggcaaaagtttgatgagagcaggatatttacaaagtatcatcccataagatacttattaattaccaggagaaaaatagtaacttcacattgaagacagttggcaggtaccacctaaagcaagtaatcgaagtccccaataatgggacaaatcaatgtgatgtgcctcttgacacaatgcactggggatacaatgccacttttatggtgttcttgcccaaaattgatttcatcaagaaaaaacaaacaaaaactgaggacattgtacaaaatacctggccagtacacactgaggtcgtgaaagacaaagaaaacttgaggaatggctgggcaaggtggctcatgcctgtaattccagcactttgggaggctcaagtgggtggatcatttgagcccaggagttccagaccagcctgggcaacacagggagacagaatctctactaaaaatagagggtggcatgtgcctgtggtcccagctacttgggagactgcagtgggaggattgcttgagcccaggagatggaggatgcagtaagtcataatctcaccactgcaccccagcctgggggacagcgtgagactctgtctcaaaaaaggaggggaggggagggaataaaaagatgaggaactactcaagattaaaggagaccaagatcaaagagatctgacaacgaaatgcatgattattgggtcctggaccagaaaaaggggcattaatgggacagtattaccttctcgattttggtaactctggttgttatgtaagatgttaacattctctgaggagggcatgtgaaaattttttgtcctatttttgtaacttttttataagtctaaattatttcaaaataaaaggataaattatacttgaaaacatatatattagagactaggctttcttccaatacccagtgcctgacactgtaaagctttgtgggctgatatatgtcagggctcaacacccacataggaagggatcccaatgtagggatccactggggaccttattaggggcaaactcaggctctgagatttatagacacaattaatgataacattcaaaagatgtaaaaatacccctaatgggtttctagggagggtcacaggcatgccacaaccatctttcagccccggaaggagctgtgcgctcctaagacccagtcatgaccagagcggcgagaaatgcaggcagaaaacagcgaatgttcctcactcacttgtcttgggattcgatatacacgtagagatgaggctcaaaacacttggaaacaatgccatgaaatggattgtctggggctttaggcttctttggctgtaaaaacaaagaaaaataaaccccatacttgagtgatctttgcaaatgttcaagaatttttttaaaaacatcatttcaaagttcattcctaagtcacagataagagagtactcaatgtaacccaatacgatggtttcaccattcaccctggcaggtgaagaaaaaccagctttgttagcataactcacttgctctggacgatgaaagacatactgctacctggataacatatgtgttttgaatctggaagcaagtcatcatctatctgactggtgttttccagaatttaaatcccagctaataatagcaccttgtatttacacagtgctttagaatttaaaaagtgctttcacacaatccaatttttgatagcactttgataccaactaatatgtcacctgctcctcacaataatccttcatgtaggtatgactactactattttacacctcaagaaatgaggactcagaggttctctaacctgccccaacacatatgtagacgtctgcttttcttaaactagaactctttctgttataccattattttcctgcaatggttcccagaattttttgaattccatcagtaagaaaatgtaagaaaaagaagaatggacaaccaatagaggattgttaactttattttgctactttctattcttaccacgagttcctaaaaaaaaaacaaataaagggtttttttgtttgctttttgagacagagtctccctctgtcacccaggctaaagtgcagtggcgccatctcagctcactgcaacctgcaccttctggactcaagtgattcttgtgtctcagcctcctaagtagctgggactataggcacacgccaccacaccgagctaatttttgtattttaagtagaggtggggttttgccatgttggccaggctagtctcgaactcttggcctcaagtgatccacccacctctacctcccaaagtgctgggcttataggcatgaggcatggcgcccagccagaaaattgtattttatacccccaaattttataagaataaaatagcagcatataggcagtactttctaagaaaggacagttggtaaccttacatcagatagatagagagagagacaggcaggcaggcaggcagactatattgtctttattttttgctttaggccactgcaacactagatgagcgctggttcccaggctgttacttggaagccactgataaagaagtcatatgacaggcaagtattttaaaacaatatttgccacttaattcctttccaaacatctaaaaaataagcaaagattttcctatgtattacttctattcctaacaaatgtgaattctgtctattgccaaatgtctacaaaatgaccctgagccaaacacaccatgctggggttgatactaaatcataatttgcatgtaaattggcacccacaacatacttgttaaattgaactactcatatcttattttttaaaaacccactttattgaggtatgattgacattttaaaagccctacataattaatgtatacatcttgatgcgtttgaggataagtacacacccacaaagccctcaccaccatcaaggcagtaagtgtatccaccacctccccaagcctcctcccacccctgttgttacgattattattacttgtggtaagaatgcttgctgggcacggtggctcacgcctgtaatcccagcactttgggaggccaaggtgggcggatcacaaggtcaggagttcaagaccagcatggccaatatggtgaaaccctgtctctactaaaaaaatacaaaaattagcaggttgtggtggtgtgcgcctgtagtcccagctacttgagaggctgaggtagaaaaattgcttgaacccaggaggtggagatggcagtgagccgagattgcaccactgtactccagcctggcgacagagtgagactccatttcaaaaacaaacaaacaaacaaacaaaaaagaatacttaacataagatctaccctcttgaactgcttatatattttaataaatactggaagagataagccctaatgacagaaatgataactacctatttctggcctttaaaaaaatttttttttaaataacacgttgcaatggttaaaaacatctgtaaaaactgatttgtaaaaaatgatcactaaaaattaaatgtcaactttagacacatctactcaatcttgtacttaaccctcttccctttttacctttcaggagttccatgtctttcattttttggcaaggtttctagaaactttggtccttcctaagaataaatacaatctgcactgtttttactcttatcatctggaagtcactgccaaagccaggccttggactgagcccacaaccacacaagcctggctgattgagcttgaatctgccggatctagaattccacttgagtgcacagatgtcctgggagtttttctgcatttccattagtttaagatgaaggatctatgatggaggatgaggattgtgaggggtgtcctcacccacttgtcctgtttattccaagtcagtatcttttattattgattcaataagatgacttaagtgaatagaaaaatgtgatttaatttgtctaactctataggactagatatcatggattcagatttggaaaacatggctactacaaacagatatctttttattaattaaataataatgataagtattatagctattctttttatttaatttttttcttcttttgaagaaaatattcacactctgcaggataacttctggtaattatacatgtgaatttacataatacagaatgttaacatttaaaaaaatcaacgtgtatattttgctttttttttaaattttgaacatgtatattttgtattcagctttactgacttactaatttatgtgtactttcccaactactgacaatattttatcactttaaaatggctacattatgaaaatctttaaaagcctatatattatagattactgtatggatgttaaattttctgattttgatctatggtaatagaattgaatgccctttttcttaagaaatatatactaaaatatttaggggtaaaggacattatgtctacaacttacaaattgttctaaaggtcgggggggagtggggaggaaataataaagttatatagcaaaatgttaacaattgctgaatccagaagaaagatatttaggagctccttgtaacttttctcttagtttgacattattttaaaaagaaaaaaagtaaaggataacgtcagaaaacttggaaaatgggtacagtggcctggtggaaaattccagagacctcaatggagccatcttaagaatggcatattgtcccattgatctatatctcttgttttggtaccagtaccatgctgttttggttactgtagccttgtagtatagtttgaagtcaggtagtgtgatgcctccagctttgttcttttggctcaggattgacttggcgatgtgggctcttttttggttccatatgaactttaaagtagttttttccaattctgtgaagaaagtcattggtagcttgatggggatggcattgaatctgtaaattaccttgggcagtatggccattttcacgatattgattcttcctactcatgagaatggaatgttctcccatttgtttgtatcctcttttatttcactgagcagtggttcgtagttctccttgaagaggaccttcacatcccttgtaagttggattcctaggtattttattctctttgaagcaattgtgaatgggagttcactcatgatttggctctctgtttgtctgttgttggtgtataagaatgctcgtgatttttgtacattgattttgtatcctgagactttgctgaagttgcttatcagcttaaggagattttgggctgagataatggggttttctagatatacaatcatgtcgtctgcaaacagggacaatttgacttcctcttctcctaactgaataccctttatttccttctcctgcctaattgccctggccagaacttccaacactatgttgaataggagtggtgagagagggcatccctgtcttgtgccagttttcaaagggaatgcttccagtttttgcccattcagtatgatattggctgtgggtttgtcatagatagcgcttatgattttgagatacgtcccatcaatacctaatttattgagagtttttagcatgaagagttgttgaattttgtcaaaggccttttctgcatctattgagataatcatgtggtttttgtctttggttctgtttatgtgctggattacatttattgatttgcgtatattgaaccagccttgcatcccagggatgaagcccacttgatcatggtggataagctttttgatgtgctgctggatttggtttgccagtattttattgaggatttttgcatcaatgttcatcaaggatattggtctaaaattctcttttttggttgtgtctctgcccggctttggtatcaggatgatgctggcctcataaaatgagttagagaggattccctctttttctattgattggaatagtttcagaaggaatggtaccagttcctccttgtacctctggtagaatttggctgtgaatccatctggtcctggactctttttcgttggtaagctattgattattgccacaatttcagctcctgttattggtctattcagagattcaacttcttcctggtttagttttgggagagtgtatgtgtcgaggaatttatccatttcttctagattttctggtttatttgcatagaggtgtttgtagtattctctgatggtagtttgtatttctgtgggatcggtggtgatatcccctttgtcattttttattgcatctatttgattcttctctctttttttctttattagtcttgctagcagtctatcaattttgttgatcctttcaaaaaaccagctcctggatttgttaattttttgaagggttttttgtgtctctatttccttcagttctgctctgattttcgttatttcttgccttctgctagcttttgaatgtgtttgctcttgcttttctagttcttttaattgtgatgttagggtgtcaattttggatctttcctgctttctcttgtgggcatttagtgctacaaatttccctctacacactgctttgaatgtgtcccagagattctggtatgttgcgtctttgttctcgttggtttcaaagaacatctttatttctgccttcatttcgttatgtacccagtagtcattcaggagcaggttgttcagtttccatgtagttgagcggttttgagtgagattcttaatccagagttctagtttgattgcactgtggtctgagagatagtttgttataatttcttttacatttgctgaggagagctttacttccaactatgtggtcaattttggaatagatgtggtgtggtgctgaaaaaaatgtatattctgttgatttggggtggagagttgatttggggtggagagttctgtagatgtctattaggtccgcttggtgcagagctgagttccattcctgagtatccttgttgactttctgtctcattgatctgtctaatgttgacagtggggtgttaaagtctcccattattaatgtgtgggagtctaagtctctttgtaggtcactcaggacttgctttatgaatctgggtgctcctgtattgggtgcatatatatttaggatagttagctcttgttgaattgatccctttaccattaagtaatggccttctttgtctcttttgatctttgttggtttaaagtctgttttatgagagactaggattgcaacccctgcctttttttgttttccatttgcttggtagatcttcctccatcctttcattttgagcctatgtggtgtctctgcccgtgagatgggtttcctgaatacagcacactgatgggtcttgactctttatccaatttgccagtctgtgtcttttaattggagcatttagtccatttacatttaaagttaatattgttatgtgtgaatttgatcctgtcattatgatgttagctggtgattttgctcgttagttgatgcagtttcttcgtagtcttgatggtctttacattttggcatgattttgcagtggctggtaccggttgttcctttccatgtttagcgcttccttcaggagctcttttagggcaggtctggtggtgacaaaatctctcagcagttgcctgtctgtgaagtattttatttctccttcacttatgaagcttagtttggctggatatcaaattctgggttgaaaattcttttaagaatgttgaatattggccaccactctcttctggcttgtagagtttctgccgagagatctgctgttagtctgatgggcttccctttgaggataacccgacctttctctctggctgcccctgacattttttccttcatttcaaccttggtgaatctgacaattatgtgtcttggtgttgctcttctcgaggagtatctttgtggcgttctctgtatttcctgaatctgaatgttggcctgccttgctagattggggaagttctcctggatagatcaatggaacagaacagagccctcagaaataatgccgcatatctacaactatctgatctttgacaaacctgagaaaaacaagaaatggggaaaggattccctatttaataaatggtgctgggaaaactggctagccatatgtagaaagctgaaactggatcccttccttacactttatacaaaaatcaattcaagatggattaaagacttaaacgttagacctaaaaccataaaaaccctagaagaaaacctaggcattaccattcaggacataggcatgggcaaggacttcatgtctaaaacaccaaaagcaatggcaacaaaagacaaaattgaccaatgggatctaattaaactaaagagcttctgcacagcaaaagaaactaccatcagagtgaacaggcaactacaaaatgggagaaaattttcgcaacctactcatctgacaaagggctaatatccagaatctacaatgaactcaaacaaatttacaagaaaaaaacaaacagccccatcaaaaagtgggcaaaggacatgaacagacacttctcaaaagaagacatttatgcagccaaaaaacacatgaaaaaatgctcaccatcactggccatcagagaaatgcaaatcaaaaccacgatgagataccatttcacaccagttagaatggcgatcattaaaaagtcaggaaacaaccggtgctggagaggatgtggagaaacaggaacacttttacactgttggtgggactgtaaactagttcaaccattgtggaagtcagtgtggcgattcctcagggatctagaactagaaataccatttgacccagcaatcccattactgggtatatacccaaaggactataaatcatgctgctataaagacacatgcacacgtatgtttattgcagcattattcacgatagcaaagacttggaaccaacccaaatgtccaacaatgatagactggattaagaaaatgtggcacatatacaccatggaatactacacagccataaaaaatgatgagttcgcgtcctttgtagggacatggatgaaattggaaatcatcattctcagtaaactatcgcaagaacaaaaaaccaaacaccgcatattctcactcacaggtgggaattgaacaatgagaacacaaggacacaggaaggggaacatcacactctggggactgttgtggggtgggaggaggggggagggatagcactgggagatatacctaatgccctaatgctagctgacgagtttgtgggtgcagcgcaccagcatggcacatgtatacatatgtaactaacctgcacattgtgcacatgtaccctaaaacttaaagtataataataaataaataaataaagaatggcacattgtcaacaccgcatgggctggagggcaacactgtgtgggaggcaaaggcactcctgcctcagcgaaataggggtgtggatcaatttcctggtttgatgatgcactctagtgccccccctggaggaagctgggagatgggaaggggtctggatcaatttcctggtttaatgatgcactctagtgtcccccctggaggaagctgggagatgggaaggggtctggatcaatttcctcgtttgatgatgcactctagtgccccgccctggaggaagctgggagatgggaaggggtctggatcaatttcctgatttgatgatgcactctagtgtccccctggaggaagctgggagatgggaaggggtctggatcaatttcctggtttgatgatgcactctagtgtcccccctggaggaagctgggagatgggaaggggtctggatcaatttcctggtttgatgatgcactctagtgccctgccctcgaggaagctgggagatgggaaggggtctggatcaatttcctgatttgatgatgcactctagtgtccccctggaggaagctgggagatgggaaggggtctggatcaatttcctggtttgatgatgcactctagtgccccaccctggaggaagctgggagatgggaaggggtctggatcaatttcctggtttgatgatgcactctagtgtccccctggaggaagctgggagatgggaaggggtctggatcaatttcctcgtttgatgatgcactctagtgtccccctggaggaagctgggagatgggaaggggtctggaccaatttcctcgtttgatgatgcactctagtgtccccctggaggaagctgggagatgggaaggggtctggatcaatttcctcgtttgatgatgcactctagtgccctgccctggaggaagctgggagatgggaaggggtctggatcaatttcctgatttgatgatgcactctagtgtccccctggaggaagctgggagatgggaaggggtctggatcaatttcctggtttgatgatgcactctagtgtcccccctggaggaagctgggagatgggaaggggtctggatcaatttcctggtttgatgatgcactctagtgccctgccctcgaggaagctgggagatgggaaggggtctggatcaatttcctgatttgatgatgcactctagtgcccccccggaggaagctgggagatgggaaggggtctggatcaatttcctggtttgatgatgcactctagtgtcccccctggaggaagctgggagatgggaaggggtctggatcaatttcctggtttgatgatgcactctagtgccccccctggaggaagctgggagatgggaaggggtctggatcaatttcctggtttgatgatgcactctagtgtccccctggaggaagctgggagatgggaaggggtctggatcaatttcctgatttgatgatgcactctagtgtccccctggaggaagctgggagatgggaaggggtctggatcaatttcctcgtttgatgatgcactctagtgtccccctggaggaagctgggagatgggaaggggtctggatcaatttcctcgtttgatgatgcactctagtgtccccctggaggaagctgggagatgggaaggggtctggatcaatttcctggtttgatgatggactctactatgttagctgtcccctggaggacgctgggagatcagtacactgtacctcgctgtactaggtttataatttatgagcccataattatttcaaaatataaagttttttaaaaagtggttcagaagatgtggacctgcatgtgaagaagttttagaaatatctttatttattttgcctatagtttcctttttatgtatgcacaaaagtgatatatgatttgaaagaaactatgttggagtaagtgtgaagagctcatctcttaggtataaaatacagattccaagtgagtaaagaaaatggctacataattccaacgaactcatcttgttcagtctgccacaggccctgcccttgatgacgtcccacaggtcctgcccttgatgaggccccacaggacactcagaaagctgcatgaccaggcagtgccagggttccacctctatctgcagatgacgctgccctgccctgccctccccaccaacagcactcttctgcagtgaggagggacccttgaccctgccaccacagcacccgggtcctcttgcagcacttctagtgagctgaagcaagagaggaataatgggagagactgcctgaagtttccttttttcttacttttttcctgcagggctgcctcctgcctatggctacgttatgaacgtgctcagtttagatagtaggtgctggaattttggctaactggcatttccctttgcaccaagcaactgcccaaagggttgattctcagcttaaacactacactaagtcatttagcagtaatgtttgggccgggttctgagtgtgtgaattctgtccaaaagctgaagatgtttaagctatttcctcctggagtttggtggaataataaaaggttactgttgtcacagtgaggaggtctgcagctggtcccacttcctttcattactacccaatgtaaacagattaaatcgaaccgctcggatcaccagaagggacattccttatttctgctcctttctgttatgctttcagtgtccctcaggctcctttcagatgtcagtttttatcattgggaatatcttggcaactgattgctcaggccctcttgtaaacgaaataccttctttcaggttccctctctcttctcagcagcgaggcgtaaactgcagtagtgagcagggtgtgacccttaccttgagggccacatggctactgactgcagccatgaaatgggttaggtcacccacagagccggcagagaccttccctccaaccacctctggctgatttcaccactaacacctggtggggtccctcccccaccccaagaggtctgcttttgttgtgcaccccactctgggaagagggagatcctggggcgcccacctaatcagccaccagcaaggccagggctggtgacgcagcaggaggtaagggatggcgtgggtggaggcattagtcactggcatgtaagtgttattactaatcagtaatagcccatgaaatggtgggtggatcagctagattagggggtttagttgtttcttttgagatggagtctcactctgtcacccaggctatagtgcaatggcgtgatctcggctcactgtaacctccgcctcccaagttcacacgattctcctgcctcagcctcctgagtagctgggattacaggcatgcaccaccacgcccggctaattttgtatttttagtatggtttcaccatgttgtttagtatggtttcaacatagtttcaccatgttggtcaggctggttttgaactcctgacctcaggtgatcggcctgcctcagcctcccaaagtgctgggattacaggcatgagccaccattcccggccattttttttttaaattacataaaacctctggttcaaaaaaaaatttcatctgaaagcccacaatacaaaatgacttgcagctctccctctccctctccctctccccacggtctccctctccctctctttccacggtctccctctcatgctgagccgaagctggactgtactgctgccatctcggctcactgcaacctccctgcctgattctcctgactcagcctgccgagtgcctgcgattgcaggctcgcgccgccacacctgactggttttggtggagacggggtttcgctgggttggccaggccggtctccagcccctaaccgcaagtgatccgccagcctcggcctcccgaggtgccgggattgcagacggagtctcgttcactcagtgctcaatggtgcccaggctggagtgcaggggcgtgatctcagctcgctacaacctccacctcccagccgcctgccttggcctcccaaagtgccgagattgcagcctctgcccggccaccaccccgtctgggaagtgagaagcgtctctgcctggccgcccatcatctgggatgtgaggagcccctctgcctggctgcccagtctggaaagtgaggagcgtctccgcccggccgccatcccacctaggaagtgaggagcacctcttcccggccgccatcacatctaggaagtgaggagcgtctctgcccggctgcccattgtctgagatgtggggagcgcctctgccctgccgccccgtctgggatgtgaggagcacctctgcccggccgcgacccggtctgggaggtgaggagcatttctgcccggccgccccgtctgagaagtgaggagaccctctgcccggcaaccgccccgtctgagaagtgaggagcccctccgcccggcagccgccccgtctgagaagtgaggagcctctctgcccggcagccaccccgtctgggaagtgaggagcgtctccgcccggcagccaccccgtccgggagggaggtgggggggtcagccccatgcccggccagccgccccgtccgggaggtgaggggcgcctctgcccagccgcccctactgggaagtgaggagcccctctgccaggccagccgccccgtccgggagggaggtgggggggggggtcagcccccaacccggccagccgccccatccgggaggtgaggggcgcctctgcccagccacccctactgggaagtgaggagcccctctgccaggccagccgccccgtccgggagggaggtgggggggtcagccccccgcccggccagccgccccgcccgggaggtgaggggcgcctctgcccggccgcccctactgggaagtgaggagcccctctgcccggccaccaccctgtctgggaggtgtacccaacagctcattgagaacgggccatgatgacaatggcggctttgtggaatagaaagtggggaaaggtggggaaaagattgagaaatcggatggttgccgtgtctgtgtagagagaagtagacatgggagacttttcattttgttctgtactaagaaaacttcttctgccttgggatcctgttgatctgtgaccttacccccaaccctgtgctctctgaaacatgtgctgtgtccactcagggttaaatggattaagggcggtgcaagatgtgctttgttaaacagatgcttgaaggcagcatgctcgttaagagtcatcaccactccctaatctcaagtacccagggacacaaacactgcggaaggcctcagggtcctctgcctaggaaaaccagagacctttgttcacttgtttatctgctgaccttccctccactattgtcctatgaccctgccaaatccccctctgtgagaaacacccaagaattatcaataaaaaataaataaattaaaaaaaaaaacaaaaacaaaatgacttgcgataaaactgctctgatcgcagggatctaggtctctggcctcctcctaacttccacagtgacatctgatggggcaccaaggaatacagtttgaaaaccattagctctcactaaagacaagctagggaagtctaaagagagaataacctactgaaggtcacatggtcagtcggttaatggccgacaagagtccagcattttcccagcacctgactctgctttaccccatgtactggtcagatgtcagtgttctgtgttcttagaatgagcaggtcttggtccttacaacagtaacttcaagctttcataggaggaaaaagttccaagaaaaaggaaaattacattttacctggcaaaactgattttgtaggtaatggggcctatcttaatccaatttaataacatccagagatgactagcgaaaagaataacttttcctggcaacactgcaagcatctgagtgtttaactgcacaatttcggacatgaccatggcagctactagcattcgtgagacatcagggctctgcaaatggctctcctgcgcaaagcatgctcacagggcagaggtggccctgtgtgggtggaggacatgccagaagcatgggctctacacccagagccttctttccaccctagtccctgctcccaaaatgcaattgagaactgcatttaattagttacaagaaactgtttgttttcttccatgccagtcaatactatgacggctttaaatcaactgcatctaatcctataaatacatctccgggatggagcctcctcaagatgtcccatcagttttgttcatttacttctattcctgagattcagttctatgtcctctactcttcaatgagacatgagtccatcaacaaaatagcactgggaaaggaattctagtttctgacattgagacctggcttccagtttaagctcctccacttccaagctgtgcaaccctgggccaaccacttaacctctctgagctgcagtttcatcacctataaagcaagaggcaggaattgtgacgataacataaagcatgtaaaagaatttaaaagtgcaaaggactataaaagtgtgagtatccattctattacaatcatttaatcaagggaccagacacatttgattgcatcatttcagaactgctcctggaagctctgctctcttggctcctgcccttgtggtgctgggaaagaatgaatgcagggctagctgcaaagtacatggttacaggtttctcagagctggtcctcccagccagcctcccttttggtggtgtctggagcaaaacaataccgtaaaataatcctccagcagccaagtgtagacaattaaaaacagggatcactaatctagaagggaaacgttctgatttattgctctaacctcccttgtcataacatggcagttaaccaaaaacaccattctgtaggatgaagggagaggaaatttagacttggacagaaaaatccaaaggaaattaaagtgttagtgtgctctgaaaagtaactcttcaaatatgccactggccaccttgacatttccaggcctccccaatggcttccagacctaaagtgatcagcttacactgcatggaggcctctcctagccgagggtgctgctggcttcccggggattgttcagcctctctcatcatcactgtaccagatgacagtcaaaccaaaaactcagctgacaagctcaggagatgctgaatgaggcagagcagaactctcctggccccaccacagtggctaatgaagcttgtgtgtgtcctggaggcggggctcttcaggagcagagatgtgggcagggaagtctgccctttcatggagttttctacatgcactttcagataaaggccttctgtaaagaccacaacagctgtcatctctgaacgtggccaagagccaaaggatcgtatctggagcaagcagaccgattttcagaaacgcacattgggtaggttacccgtggtgacgcaaaccagacttacttgatctaaatctcctttctccgttgccagttcctccatctctggtgttggctcatcttccaggaagggattggtagatgggggtggagactcaagctttttctgttaggtagatatgagaaagagaagtgttttctgagcatattcaatagctttccccattgatctgctttttctaggtgtctccaacaaggaagtcatgcacgctatctgataaagaagaactgaggcaacccagaccacattcttgcctccgggccttcacagtgctttccctcttcctgcaacctccccgaccaccccgccccaactcgaatctggctaaaacgctcacgcatcctcagtcctcaaaccggaactccgttctgctgggaagcctttcccatctgtcaggtttgggtcagatgtccctgacacgtgttcccaaaccaagctacatgtctcctacccaggcatttattaaaatatagcaattgcccattatttgtcttttcccttctggcctccatgatggcagagattgtgtctgtcttgttccccatcctatctcagtgcctagcatgtagcaggtcctcagtaaatagaaatgaatcaaagtgccagatggatttcaacgcaagaacaaactacaaaactaatctcatgtgttctagattaacagatgtctcttcccaagtaagccccattacaacaaccacaacagaaatctccttgagaaaatcgacttctcagcttccaaatatgaccactatttcaaaatacatcacggagtggaaacatgggccagtgggaaggctgcaggcaggaggcatggtagctgtagctccaaccgtgcggcactggccctatcacccagcttctctgagcctcagtaacttcatctgctgaatgaggatgtagtcacaggactatctggaggatcaaatgtgaaaccctagaagcagcacatgatacacacaagggtcactgatgacgttaattccagtacaactacagaatcaaggcagctctctggaattcctttacagttttcacctagagatgttgtttatgcctgggagctgaaggctttagcagaaaggaggccaactggacaaacagaaaagagggactgcttggtgctggggacgagggaagggggcaaggcatggctctctggagacgagaagttaatggagagggagtttctaaatgtacttggtattttagccaataccagtgggtcaatctgaattaatctctaagccaaaagggacagcagatggactatagcgtgaataactttgccaagtgccaggacaccatctgaagctattacaaacaaaaataaaaccaaaacttacacaaaggccgggtgcagtggctcacacctggaatcccagcactttgggaggctgaggcggcggatcacttgaggtcaggagttcaagaccagcctgaacaacatggtgaaagcctgtctctactaaaaataccaaaattagcagcgtggtggtaggcgcctgtaatcccagctacttgggaggctgaggcacaagaattgcttgaatccaggaagtggaggttgcagtgagccaagatggcaccactgcactccagcctgggtgacaaagcgagactccgtctcaaaaataaaatacaataaaataaatacattgcacaaaagcactacacctgcgtctggtttttggtttaagacaatactgctaacagtcatttaataactgcttattttttggccaaaacacttggatgcaagtgatgtggacagatacagcctcggtgcatgacaaagccttgtggtgatggcattagctcgaggtaatcagtagtaagatgatggtttttgtggtatcctggtgataaacaatatggtctaacacccaagcaagtatttcacatttgcacactccaaactttggcttctttacctaacatgagagaaaaaaaatccttaaaaatgtacagctcttgttagaaagcagtatttctaagcttgagttgtcttcttaagggctgctgatattttagagagagaggaatagtaataaagggaatctaccaagcttaatcttcaacaaccataaaaaaattaaattaggtaatagcattagactcctgattccactggcttaacagtgggctctgggattatgctgttgagctgagtcactatgattctaagtcttttggtcctttgtagatatgaaaagcaagtcagctaactgaagttaaaagctttgatcaaaatcattcagtgacagacacagaatttgagtttttgaactaaatgcccctcatctattgctaagtctattgggttgataacagcacctcacaattacataaagatgggcctcgtttttaaaacataatgtgttattggaaatcatggcaaacagcagatgtcagtgacgtggactgagaacgttcccgggctctgctctcgctggcataaagcatcaagaaaacgcagagggtaggaagaagtcaaacctactctcactggcgtaaagcatcaagaaaacgcagagggtaggaagaagtcgagcctactctcgctggcgtaaagcatcaagaaaacgcagagggtaggaagaagttgaacctactctcgccggtgtaaagcatcaagaaaacggagaggggaggaagaagtcgaacctaacgggcagccctgaagaagcaggcaccatctgaggcaggtgagcacaggccactcgctcagtgtcaccatctgggatagagtgagcatgggccaacctcagcctcctgagtagctgggactacaggtgcacatcaccacacccaagtaatttttgtattttttgtagagatgggattttgccatgttgcctgggctggtctgaaactcctgacctgaagcaatccatctgtctcagcctcccaaagtgctagaattacaggcgtgagccaccatgcccgtcctctattaacatgaggggagttgtggacatcaaggagctcctagctcactcatttgtggcacatgcattccacatgtggaccaagttagtacaggaaaagtgattcattccttccctcatccactcaacaaagggatatgcttggccctaggagtagagcagtgagaaagacaggccagcctccgccctcatggagattagagtctgctgggggagacagccttcaatccaacagtcacacaaacagtgagaagggccaggaaggaaaagcagtcgtcatggaaacgtgcaacagagggccgcagccgtccctaaagaaaagatgtctgagccagagctgaaggatgcctcagagtgaaatatatgaggggtggagggcggagggaacagcacgtgtctgccgctcactcaacaatgatgtactgggcatccactctgctccaggcactcttgggtgcaccagggatgcaagtgaggaagatggattagagaggcggcactgtagtggtgagaagaaaactcagggagtgggatgagctggggatgagggtgggaaagtgcttctacacacagggtcatcagaaaaggtctctgaggagatgacggctgagctgagtaagaaggaactgctcaggcaaaacccaaggaagggtgttctcagcagggagacccggtggagacgctggaaagcatatggtgagtctgagggacagaaaggaagatgggggcctggggtaagaggggtggcgggagtcccatcatattggtgaatcagggatggaaaggaagatgggggcctggggtaagaggggtggcgggagtcccatcatattggtgagtcagggacggaaacaaagatgggggcctggggtaagaggggtggcgagagtcccatcatattggtgagtcagggacagaaaggaagatgggggcctggggtaagaggggtggcgggagtcccatcatattggtgagtcagggacggaaacgaagatgggggcctggggtaagaggggtggcaagagtcgcatcatattggtgagtcagggacagaaaggaagatgggggcctggggtaagaggggtggcgggagccccatcacgcagccttttgtgggccatggtaagggtcggttttcttctcactgcaattgggcagtcgctggtagttttcaacagcgaagtgatgtgatctaatttggattttaaaaatattccactgctgtaggggaatggattataatgacagcaggcaaaccagtttaagaggctgctacagtgctccaggaaagggctgatgggaaccggactaagccagtgttccaggaaagggctgatggggaactggactaagctggtgatggacgatagaaaaaagtgtccatcggatttggggcacagttaggaggcagagccaggaggctttgctgagagagtgagaacgagggtgagggaatgaaaggagtgaagggacagtcactttctggtctgagcaactgcacggctgatgttgcccttaactgagatggggcaccctcgtgtagtggcaagggcacaggctccgtatctgacagacccgggttcgagtccaggttccaccatggggtatgctgtttaacttctagcctcagttctcctacctgcaatgtgaagggataggaatacctacctcgtatggctgccatgaggatgggatgaggcatgcgtgtcaggcgtgagctacacagttacgtgctgccatgaggatgggatgatgcgtgcgtgtcaggcgtgagctacacagtcatgcaccacatcaccatgtttccatccatgacgggccacggtacaaggcggttccactagattataatggagccatacaatagagtaggccaggggtccccaacccctgggccacagtccatggcctgttagcaaccaggctgcatatcacgaggtgagcagcagtgagtgagcatgactgcctgggctccgcctcctgtcaggtctcataggcaaaccctgttgtgagctgctcatatgagaggtctaggttgcacactccttctgagaatccaatgcctgatgatctgaggtagaacagtttcatctcgaaaccatcccctacccccatcccctgcactcccacccccacccccacctctggaaaaactgtcttccacaaaaccagtccctggtgccaaaaaggttggggacagctggagtaggttctagcaggcacactctatgaggtttgcacagtgatgaaactaatgatgcatttctcagaacatattcctgctgttaagcaatgcatgactgaatatatacagcagcttaacatgctgtctggcacagagggcaaggctcagcaaggggaagctttgagcagtaattaatagggtgagctacgaaacaaggcaaaactgttgtgcttctcttaataaagcagctcacagaaaacgtgggcatgcaggcttaaaagtcttgtcaaaagaatttctattaaccataagtggagcctcgtcccaactactttgtctctttgggatctctctaagaaataaaagcaaagggcccatcaactttgcactttctaagtggaaaggcacacggagctgctcctttcttccccagtctacaacaacgcacataccaccctcctccctgttgataaaagtcctaaaaccctaaggtgtggatatgcattcccgctagttagagggctacattactgctcagactgacttgctaagatgaaagaacaagtccttgtggggagcgatcactggcataacgcagccttctgtgctaagagccacacagatcacgcttctcaggcttgctttgcagctgtcacaggccacagagaattacaactttggggttagattgtcagtaactcaaaggacatatttcatgaactctgaggctgctaaataaagccaaaaatttccaagaagtgaatgacttccaattttgaaagaattcattctttttgctatgatgacagttgatttcaagccgatataggaaagcaaaattcttcatatagcaagttaatccctactgattaaatcacaggggattcccagcaccttcaaaacagttcagaccacaggacagtcaggctgtctaattcactgtcaagaagggaaagtctggcttcagtcagcagtacatccgtatctcgtctgcctacacaaatccctgtgtgaggccctagctggacacatcgaattatcaaagaaggaactctgaaatttaagactcttcctttccctagaggggaaagctttcgcttgtgagatgaaagttcctcagtttctgcatttctcactccataaatgctttactccagcccaattcctaattggtccttaaagagatggctgcggggctttagctgacagtcaggactgcaagcccaggggttcacacacttggtgtccaccatttctggggctactctcttgctaccgccatgtccacttcttctattgcaacagttatgtacagacttctttctcctactagaccctaagtgccttcccgatccaatttctcatcttttccaaagccctgaacaaagagggaagcttgaaaaatataagtgggtaaatgctgatcagatgaaaggccctcaataaaatcctcttcagaaacatgggcaacactttctattttctgtaaacaaaacaaaaagcctgcgtatatgtgtgcaagcgtgcttgcagaagcgtcaaaaatataccccaaagaattaaacagtgtggatacctccagggggagggatatacagtagttaagaagagatgtttatttaaaatttttttttctatttgagtttttaataggcatatatagctatttctgcttttttcttttcttttcttttctttttttttttgaaacagagcctcactcttccacccaggatgaagtgcagtggtgcaatcacagctcactgcagtcttgaactcctggacttaggtgacccttgcacctcagcctcctgagtagctaagaatgcaagtgcacactaccacgccctgctcattttaaaatttttttttagagacagggtcttcgtggcccaggctggtctcaaactcctggctgtaagagacctgcccacctcggcctcccaaagcgctgggattttaggcatgagccattatgcccggcccactgctcatttttttttttgacagaatatttatctgaagagtaaagatgatttataactaaactcatacactatcttctaaagcctttaattctaaattgtgatgtaattcatgtcacataaaactcaacattttaaagtgatttactattcagtggttttcggacattcacaaggttgtgcagccatcaccaccaattccagaacatttttcacccccaaaagcaacccctacctgttactgggaagctgttacttcccagtcttccccttcccaaccccatcggcctctatggatttgcctcttttgggtatttcctatagatggaatcatataatgtgtgacatctgtgtctggcttctttcactcggcatggtgtgtccaaggttcacccaggtcagggcacgtatcagcacttcattccttttacgtgaataatattccactgtacggacagaccacgttttggttattccttgtctactgatgtttctactttttggctattgtgaatagtgttgctatgaacatttgtgtaagacatacgaacatatgtttttaattcccttgggcatatacttagaagtagaaatgtgtaattaaaaaaaaagaattcagattgctttgctttttctatttggcagagttaccccttcacattaggcatggcacattaacactgtgagatgcactgaaacaagcagggactacttttaaatcttaactgcatttggaagaacagaaaggaagaggaacagaaagatgtttaaagcagaggctgaaattgaaagtgctcacaacttgagccgataattccactagtgtcgtaagaaaatcatctcactgctttgggtaagagacagcgaagaggagagaagagagaagagaagagaggaaaaaaacaatctcaaatgcatataaaattagtagacaaggccgggtgcggtggctcacgcctgtaatcccagcactttgggaggccgaggtgggcggatcacgaggtcaggagatcgagaccctcctggctaacatggtgaaaccgtctctactaaaaatataaaaaaaaaaattagccaggcgtggtggcgggcgcctgtagtcccagctacgcggaggctgaggcaggagaatggcgtgaacccaggaggcagagcttgcagtgagccgagatcgcgccactgcactcgagcctgggcgacagagtgagactccgtcacacacacacacacacacacacacacacacacacacacacacacacacacaaattagtagacaaaaatattcatatagccctatttataaaagtgagaaaaaactaagggtcctacgagaaaagaataattaggggaatcactgagtatctatagaataaaatctttctgtagtagttgagaaacaacttaagctgtgacatatgaagcatattttcatatgtgtgtgtgagttaatatggaaattaactcaaaatggatcaaagatataaatgtagcagctgaaactataaaactcttaggaggaaacctaggtaagtctctgtagccttggattacgtaacagtttcttggatatgacactaaacacaagcaagaacaaaaaaccttcattaaaacggaaatcctgtgaaatgactatcaagagagtgaaaacccacagatgggagaaaacattggcaaatcatatgtctgatacatgataaaatatctaaagaagttataaagcctgggcatggtggctcacgcctataatcccagcactatgagaggtcgaggcgggtggatcacttgaggccaggagttcaagaccagcctggccaacacggcaaaaccccgcctctactaaaaaaaaaaaaaaaaaatacaaaaaatacaaaaattagcctggcatggtgctgcgctcctgtggtcccagctacccaggagactgaggtccgagaattgcttgaacccaggaggcagaggttgcagtgagccgagatctcaccactgaactccagcctgggcaacagagtgagactctgtctcaagaaaaaaaaaaaaaagttatagaatatatctagaatgtgtaaacaactcttacaactcaacaataaaaacaatccaactaaaaaatgggcaaaaaatgtgaatagacatttccttttttttgagacatgagtggcgcaatctcagctcactgaaacctccacctcctgggttcaagcgattctcctgcctcagcctcccgagtagctgggattataggcacccgccaccacgcctggctaagttttgtatttttagtacagacggggtttcaccatgttggccaggctggtcttgaactcctgacctgaggtgatgctcccacctcggcctcccacagtgctgggattacaggcgtgagccaccacacccagctgaatagacatttctttaaagaagctgtgcaatgtcactagtcaatgggaaaaagcaaatgaaaaccacaaggagatactactctacacccatgagaatggctataattaggggaacaaaggagacacgcgtcagcaaggatatggggaaactggaccctcctacattgtgggtagaaatgtaaaaccgtgtggctgcttcgaaaacagtttgcagttcctcaaaaagttaagcctagggttaccatgtgacccagcaattccactcaggtatattctcacaagaataggaaacacgctgacacgaaaacctgtacaaatattcacagcagtattcatacagtgaaaacctgtaccgatattcacagcagtattcacatagtgagttcacacagtgaaaacctgtacaaatattcacatagtgagttcacatagtgaaaacctgtacaaatattcacatagtgagttcacacagtgaaaacctgcacagatattcacagcagtattcaaatagtgaattcacacagtgaaaacctgtacaaatattcacatagtgagttcatacagtgaaaacctgtactgatattcacagcagtattcacatagtgagttcacacagtgaaaacctgtacagatattcacatagttcacacagtgaaaacctgtacagatattcacagcagtattcaaatagtgaattcacacagtgaaaacctgtacaaatattcacagtgagttcacacagtgaaaacctgtaaaaatattcacatagtgagttcacacagtgaaaacctgtacagatactcacagcagtattcaaatagtgaattcacacagtgaaaacctgtacaaatattcatagtgagttcacacagtgaaaacctgtacagatattcacagcagtattcaaatagtgaattcacacagtgaaaacctgtacaaatattcacatagtgagttcacacagtgaaaacctgtacagatattcacagcagtattcaaatagtgaattcacacagtgaaaacctgtacaaatattcacatagtgagttcacacagtgaaaacctgtacagatattcacagcagtattcaaatagtgaattcacacagtgaaaacctgtacaaatattcacatagttcacacagcgaaaacctgtacagatattcacagcagtattcaaatagtgaattcacacagtgaaaacctgtacaaatattcacatagtgagttcacacagtgaaaacctgtacagatactcacagcagtaatcaaatagtgaattcacacagtgaaaacctgtacaaatattcatatagtgagttcacacagcgaaaacctgtacagatattcacagcagtattcaaatagtgaattcacacagtgaaaacctgtacaaatattcacatagttcacacagcgaaaacctgtacagatattcacagcagtattcaaatagtgaattcacacagtgaaaacctgtacaaatattcacatagtgagttcacacagtgaaaacctgtacagatactcacagcagtattcaaatagtgaattcacacagtgaaaacctgtacaaatattcacatagttcacacagtgaaaacctgcacagatattcacagcagtattcaaatagtgaattcacacagtgaaaacctgtacaaatattcacatagtgagttcacacagtgaaaacctgtacagatattcacagcagtattcaaatagtgaattcacacagtgaaaacctgtacaaatattcacatagtgagttcacacagtgaaaacctgtacagatattcacagcagtattcacacagtgaaaacctgtacagatattcacagcagtattcaaatagtgaattcacacagtgaaaacctgtacaaatattcacatagtgagttcacacagtgaaaacctgcacagatattcacagcagtattcacacagtgaaaacctgtacagatattcacagcagtattcaaatagtgaattcacacagtgaaaacctgtacaaatattcacatagtgagttcacacagtgaaaacctgcacagatattcacagcagtaatcaaatagtgaattcacacagtgaaaacctgcacagatattcacagcagtattcaaatagtgaattcacacagtgaaaacctgtacaaatattcacatagtgagttcacacagtgaaaacctgtacaaatattcacatagtgagttcacacagtgaaaacctgtacagatattcacagcagtattcaaatagtgaattcacacagtgaaaacctgtacaaatattcacatagtgagttcacacagtgaaaacctgtacagatattcacagcagtattcaaatagtgaattcacacagtgaaaacctgtacaaatattcacatagtgagttcacacagtgaaaacctgtacagatattcatagcagtattcaaatagtgaattcacacagtgaaaacctgtacaaatattcacagtgagttcacacagtgaaaacctgtacagatactcacagcagtattcacacagtgaaaaagtggaaaccacccgaatgtccacagctgatggaagagacaacaatatgtgcatcacccacacaacggtgcactattcagccatcaaaatgatgcactgacacacacctcatcatgggtaaggctcgcagacactgtccagagggagggaaggcagacacaaaaaccacacatcgtagcatccgtttatgtgaagtgtccacaacaggcatccgtaaagacaaaagtcaattcgtaactgcccaggactggggaaagagaacttgaaagtcctgcctgctaaggagggatttcttctggggtaacagaaatgtcctggagttgcacagctgggatcgtggcatcatcttatgaatatatgaaaaccaactgaactgtatactttaaacgataaatttcatgtgacatttcgtgacatgagttatatctcaattttaaaaactaggcagagaaaactgtatttaaaaaaatacaatttcaaccatgtaaaatatatagaaagaatatacccaaatcctcatctctgatttggatgacttttttcctgcttctctattctcgccataatttccaaattttctatcctgaccctgtattattctcttctcagaaacagaagttaatcgtcccttgcaatattattcaaatggaagaatacatttctttagcaccagtaaagcatccataaaatattttccaacgctgaagggagtgcatgaggcgggggaatctgtcactgtcggagacagatgtcctcaagctgtggcagagctggaaaacctgcccctgttccttacacagtctccctcatgcaggtgccggaagaccagggtgtagagtgagacatgctgggtggtctttcatgagtcgtgagccttttgcaaacgctcttacactcaaattccatggctgacaattgtacccatatagcttctatctttagaatgtaattctaaaaactggggaagtaaaggcccctataagccaaaggacaagtctgtttcaaaaggcaacttatgcagtggtcaagaggaagggaaatccagctgcataaaaggggaacatttttaattttattactacaaaaaaaacaaaaaacaaaacaaaaacctcccagtgaggcagttataaaaagctaatccgatctagtctgcttttctgctttcagcagaaggctgaatgtcatttgctcaccttgaatctaatcatcaagtcactaataatgcatatggatccagttacatcacatccagacattctcttttaatttcaaggcattttaatttatagactctcttgaattcctcctaaagggtcagaagttgaggcaactgggaaaagcacaggcagctcacctcctcaagtaacagttacagcacaggacatcgtgaaactggttaagcaacaagcctgtccctgaggctctttcagtctaaagttctatcaaatgttgaagtcacagctcttgaaaaagagccaaggatgatgcatcccactgaagtcaggagtgatgggtcaggaggagctgagctgtggcaggtcttgtcttccgggcgagctggccacactctcaagctcatcctcactgtttcactgccagtcaccaaggactggagaggtttggaatgatacagtgaaggcggcagtgggggtagggtggggatgacgtacagcctagggaggggcagcaagggagagtctctggccgttttggctccttggctgacatcttacctgttttgtggcacctttctgaggaattcagtaactttctataaaatctggcatatatcaaagggtatcaagatataccttggttcgtttcacaatttattctggtattttgaaacaaaatggtagccaaaaaggagtttccaaagagtgtatcctgaaaggaaggtagcatggggaaggggtcaggggccagggagcagcatatctccaggcagggtacccagcagctagactgggggtcaggacagctggaactcctggccttgcccaggcagccccttcccggtgctttgcgttgggagcatggtcggtagccatgatgaattcaccaaggtccctgccactgagggtcgcagaataaaggtgaagaaggtcgtgcacggcccacaatgagatgatggtggggaccaggctcagtgtgaacatcagctagagtgacagccttcacgtctcctcacagcagagctgcagtgaaccgattcctcaaggcccgtcccacctgggtaaagtggccatagggcttctgttgccttcctagaaacttatctttaagggaaaacccttgaaggatatcagacagccattttcaggatttggaatgcagaataactgccaggtcgtgatacctggcacaaagaatagggtaggaggacgaagttgaattaaagaagctgaaggatttagagaagtctgtggagaggagagctgactaaatagagagggaaagaaagaactcatggtgttcatcaggcttttctggctaaggatttagaacctgaaactctgcaaacttgagaggagaggagagcaacaactgaacaatgaagaggggatgatttaaagaccagttctgccaaaacatttcaaatatgaaaaccaaaaaggaaggagctggggaaaaaggctcaagtgttcctagctgacccctgaccaccaccacagagcaccacctcggccaggagacactgggctccaggccaggagcttggccctggccgagtgagttcaggcagaaaggggctgtgctgccctgagaaaccagtacccccagcccagtcctcccgggacagaaggtgtctgacagttggccaactgccattctgacagtcctgtacctgtgttttacaataaagcattgtctttgcaaacttgagtaagctcctgtcagtttttcatggtctctacgtggttaccctgttcagctgcctcagcttgtccagaagggccttccctgccctcgttcccttaccacttttggcctttgggggatttttccttggagaggtcctgggacagacccaggttcacaggctaccctggtcctcagatgcaacagggccatttgttcctctgtggtcctatagctccctaaatgtaaaagacaaatcaccaggaagtagggcccagccagagagggtgaagaatggctcaaaacaagtgcttggcaagaatgtcattcaagcatccttcactgggacctatttcccgtccggttatctggattaccagctcacagagcctgtcctgatgctctccggaccctgcccagccagaggccgtgggagctcagggggctactcccagggtggggcctgtgctcaatgctgaaccctcatgcttgtcgccgggcagatctccgtagggctgaatccagtgccacatatatctacgcttgaaaccaggcaggagcatggcttgggaaggtccgagaggagagccagcaagaggaatcagggggctgctaaagccaacctcatacttctcaggagaaactcaggattccttcagtgggatctctgttcctatttcctttccttttctgtttttttgagacagtctcactttgtcacccagactggagtgcagtggtgcaatctcagttcattgcaacctctgccttctgggctaaagtgatcctcctgtctcagcctctcaggtagctgggactacaggcgtgcgccaccacgccccactaatatttcccgggtagctgggactacaggcgtgcgccatcaggccccgctattatttcccaggtagctgggactacaggcatgcaccaccacgccccactaatatttcccgggtagctgggactacaggcatgcgccatcaggccccgctattatttcccaggtagctgggactacaggcatgcgccaccacgccccactaatatttcccgggtagctgggactacaggcgtgcgccaccacgccccactaatatttcccgggtagctgggactacaggcgtgcgccaccacgccccactaatatttcccgggtagctgggactacaggcgtgcaccaccacgccccactaatgtttcccgggtagctgggactacaggcgtgcgccaccacgccccactaatatttcccgggtagctgggactacaggcgtgcgccaccacgccccactaatatttcccgggtagctgggactacaggcgtgcgccaccacgccccactaatatttcccgggtagctgggactacaggcgtgcgccaccacgccccactaatatttcccgggtagctgggactacaggcgtgcgccaccacgccccactaatgtttcccgggtagctgggactacaggcgtgcgccaccacgccccactaatatttcccgggtagctgggactacaggcgtgcaccaccacgcctgctaatatttcccgggtagctgggactacaggcgtgcgccaccacgccccactaatatttcctgggtagctgggactacaggggtgcaccaccacgccccactaatatttcccgggtagctgggactacaggcgtgcaccaccacgccccactaatatttcccgggtagctgggacgacaggcgtgcgccactacgccccactaatatttcccgggtagctgggactacaggcatgcgccaccacaccccactaatatttcctgggtagctgggactacaggcatgcgccatcaggccccgctattatttcccaggtagctgggactacaggcatgcaccaccatgcccagctaatatttcccgggtagctgggactacaggtgcccacgacacctgctaatatttcttgggtagctgggactacaggcatgcaccaccatgcctgttaatatttcctgggtagctgggactacaggcgtgcaccaccatgccccgctaatatttcccgggtaactgtgactacaggcgcccaccaggcctgctaatatttcctgggtagcagggactacacgtgtgcaccaccacacctgctaatatttcccgggtagctgggactacaggcgcccaccacgcctgctaatattttctgggtagctgggactacaggcgcccaccacgcctgctaatatttcctgggtagctgggactacacgtgtgcaccaccacgcctgctaatatttcccgggtagctgggactacaggcgcacaccaccacgccccgctaatatttcccgggtagctgggactacaggcgtgcaccaccacgcccagctaatatttcccgggtagctgggactacaggtgtgcaccaccacgcctgctaatatttcccaggtagctgggactacaggtgcccacgacgcctgctaatatttcccgggtagctgggactacaggtgcccacgacgcctgctaatatttcctgggtagctaggactacacgtgtgcaccaccacacctgctaatattttccgggtagctgggactacaggcgcgcaccaccacgccccgctaatatttcccgggtagctgggactacaggcgcgcaccaccatgccccgctaatatttcccgggtagctgggactacaggcgtgcaccaccacaccccactaatattttccgggtagctgggactacaggcgtgcaccaccacgcctgcttatatttcccggatagctgggactacaggcgtgcaccaccacaccccgctaatatttcccgggtagctgggactacaggcatgcaccaccacaccccgctaatatttcccgggtagctgggactacaggcgtgcaccaccacaccccgctaatatttcccgggtagctgggactacaggcgtgcaccaccacaccccgctaatatttcccgggtagctgggactacaggcgtgtaccaccacaccccgctaatatttcccgggtagctgggactacaggcgtgcaccaccacgccccgctaatatttcccgggtagctgggactacaggcgtgcaccaccacgccccgctaatatttcccgggtagctgggactacaggcgtgcaccaccacgccccgctaatatttcccgggtagatgggactacaggcgtgcgccaccacgccccgctagtatttcccgggtagctgggactacaggcgtgcgccaccacgccccgctagtatttccttttctgacctgcattttctttaaggctattttcacctgttttgtgacccatttttttcccttgttactaaaaagaaatcaatattgaacattagttagcaagcagagaagtatacatatttttgatgtgctaagtaggaaaagagtgctttgtggtttcagctgcattttattctaataaagtcgtgagtgagcccaagtaggcaggaccttgtggtctggcctcaaaattgggctgctgccaccaccgctctgcagtccattgcctgaaaggccagcccgattcacctgctccaccctgtctaaagaccagcccgattcacccgcttcacctgctctgaggctggtctcatgggacaaagagggaattgcactgaagtctcagggttttaggaccagaagggtaggagctagagaaggtggcagaggtgaaggttgaacaagtgagtgggactccaggtacaagtcccagcctgcccccggcttcaaccacagtagctcagtttcacggtcttacacattagctccgtggcctggagtaagtttcaaatgagcacagcgcctacttcctatggctgatgaagcacagtgactgactgcaggtaaacgcacctaatatagcgtgggtcaccaagtggatgttcaaagcatgacagctatgggtgtttcagattctacattctattttttttttttttttgagatggagtctcactctgtcgcccaggctggagtgcagtggcgcaaccttggcagcacccaccaccacgcctgactaattttttgtatttttagtcgtgatggggttttgtcacggtagccaggctgctctcaaactcctgaccttaagtgatcatcccacctcagcctctcaaagtgctgggattataggcatgagccaccgcacccggcctctacattagattttgttacaagaaaggatttggaaatcactgatttggcccatctctctcattttaaaacaattgaaaaataactttgttaaagtacacacaaagtatgtaaatgcatttgtataagaaaatttccaaaaaaactataccagagtaaatggaaaaaaatatttccttgcttctctacctactctcactccaacttccttcccaagagacatccactgttaccatttccagacctctttcttatacatttacacacataaacatgctttttactttttccataaaagacattatacctcccaaagtgctgggatgacaggcgtgagctgctgcgtccggcccccgttctaccacttttaaactgctgtgtagcatctcacagtatggatgcactgtaatttatttaaccatcttcaataataaacattacagacacagccaagccttttgcttttaaggctgcagttcacctctttctttgtgcatcttcctctacatgtatggatttttttttagacttctggtttagatgtaaaattgttgcttgacaggacatgcatatttacatttctgaaagttctgataatgacaatttatgcaccaaaaaggttgtatcaagctgtatactagccctaaaatcctgtactgttagtcttgtaatttttttctgtttgcaaacctgatgtaggaaaaatatcctgttttcttttttttcatgtttattagccaactgaatttcttcagtcaatcgtctgtctgactctgtactcatttttctaacgggttactcgtattttccttatggatttttaggagttctttacatgtgctagatattaatcgtttgtgtcatgcagcttcaactgttttttaatcccttgattatgtttctggtctctttttccaaaagaacgttgttctctttatgttgttaaaccttttagtacttttcttcatggcttttgggttttatgtcttatttagtctccctaatattctgttattaaaggataggtgggcatggtggctcacacctggaatcccagcactttgggaggccgaggcgggcagatcacctgaggtcaggagtttgagaccagcctggtcaacatggtgaaaccccgtctctactaaaaatacaaaaattagccaggcttagtggtgtgcacctgtaatcccagctacccaggaggctgaggcaggagaattgcttgaacctgggaggcagaggttgcagtgggccgatatcgccccactgcactccagcctgctgacagagcaagactctgtctaaaaaacaaaatgaaaaaacaaaaaaataaaaaaataaaggatagtcttttcttctcatttaacagggaaggcagttcactacattacagcagaatcgggattagaccacaagtcttgactgctggtccaaggattttgctactaaatcactttgcttctctattgttacccgcagtttaaaaaaaaaaaacaaatctagctctaaagaaaattcaaaggtatgattctctcaacttggatttcttcttccctccctcctttcttctttccccttccattcctgcctgcatgggttctgtgtacactctgcacgactcgaggagacggatgagtcagctacaattcctgtattcaaggagctcaatgtctacgcatatgtaatgatgcaaacagaaattaccatagaacagagtcacttggtttcccagtggacaggaaatctgaagagagcaccttgatgtgttagcagggagcctgggcctccaaagagaagaggtttactcctttctctttcttttctttttttttagagatagggtgtcactctgtcactcatcatagctcactgcagcctcaactcctgggctgaagtgatcctcctgcctcagcctcccaagtgattgggactaaggggtgcacccgactaatttttttttttttgtagggatgaggtctcactatgttgcccaggctggtctcgaactcctggtctcaagcaatcctgccttggcctcccaaagtgctgggattatacaggtgtgagccactgcatcagaccaaaaagaagaggtttccggagtgaaaatttggacctggtctttgactacacagagacaaacgtttaaccggcagtactatgttccacctttccaatggaggcacgtagtccccaggcctgtatacctggctttggggtttacagagactcattgacctagtttgttcaccagagatgttaaaaggtaaaccctaaagtaaaaacatatcctaattgtaaccaaatctgataactgataaagaaataaggtatttgtgactgagtaaggcctctgactcacaaaattactagtctgtaaaatgggatcaatacttaagaaaaatgatgacagggcattctagaaacatgatgtactgcgtaagagacaaacaataaatccacacagagtgttctgtatcatcactttcccagcagctcagtgaaatcactgcaatgaggggttaagcaccgaagccaatggatagagtcaccatacagtgaaaccctgaatcccaaccacccaacccactgatttcacgtggcagctccctagggaaggtcttaccagggtcccatcggtcagggtgcagccggagaagcgttttgcaagaaacccctcaaagttagttgttctttgaatagcaaaaagaagcaatttcacttcaatttccttcgctctggtacgcataatcttggcaagttctgcccttcaaaacaaagagataagaatactatcaaacaagctgatcattcattcagtagagataaggtaaatggccttagcttatattcagaaaaaaaaaatgtatgtggtcatttcaaaccctgaggtctgttaccaccttagtctaaaacctggggaatagaaatacatattctaaacaagatttttaaggtgaaattatccaccaggcaaaaaaatcaggggtcatggatgatatatatatacttatatttatttgtttgtttatttatttatttatttatttgagatggagtctccctctgtcgcccaggctggaacctccacctcctgggttcaaatgattcttttttttttttgtatttttagtagagatagtgtttcaccatgttggccaggctggtctcaaactcctgacctcaagagatccgcccacctcggcctcccaaagtgctgggattataggtgtgagccaccagtaatttggttacatagttactacgttgcctgtatctttgaacagtttaataattggataataatacatatggagcacctaattttttattagtgtatatagcctatataatttcacaagtcattaattactgaattataaagccctccctcttcctgagggcccaataatcatctcttcaactagagagcaggagtcctggaaacacacgcaagggacaggatccctgcgggaaaagtggcaagcacgcttagctggtccctgcccgagaagctcctgtgcagctctcactcaaacgttccatctcagaagctcagttgctggtgaacagggacatgtgagttcttagtaaggactaagctaccatcttctcacacaaataaatgacaaaatgaaacaaagagtctctgagtttatttgagaatgatgtatctgtaggattttagccaaaattctaacaatagaagcttggcagcaacactgccattagccgagacaacaatggcaggtactggcgctcacaagaaacgtgctggctctagcatacgtccagcctctcccaggctccatttctcactgagctggtttgcaagtctgctgaactgtaggctaaaaagaattagctaacagtttctcaaggaattcactctttattttgttaattgggatttagaaggtgacaatctcaactcatcttaaaccaatgctaaaaggttctctaaatctacaggagtcaatgtgtttctttttttttcttcctctttctttctttttcccttccactcgccctccctccctccctccctcccttcctcacttccttccttctctgtctttctctctcttctttttttttttttgagacagggtctcactctgtcacccagggctggagtgcaatggcatgataatggcctactgcaaccttgacctgggctcaagcaatcctcccacctcagcctctctagtagctgggattacaggtgcttgccaccatgaccagctaatttttgcattttttgtagagatggggttttgccatgttgcccaggcttgtctcaaactcctaggctcatatgatccacctgccttggcctcctgaaatgctaggattataggcataaaccaccaagcctggcccaatgtgtttcttagaataacagccacacagaatggagctcagtgcacctgtagttgcagctacttgggtggctgaagcaggagggctgcctgagcccgggagttcaaggctggggtacgctattaccatgcctgtgaatagccattgtactccagcctgggcaacactgcgagacccccatctcttaaaaaaaaaaaaaaaagccacacagaatgtatgtgaacaccaagcgtgaacactaccatgaactatggaccatcactctgggtaatgatgatgtgtccgtgtagtttcatgagctgtgataaatgcatcgctctggcggaaggtgccgaccatggggaagactatgcacgtggggccgggagcacctgggaactctctgtgtcttctgctcaattctgctgtgaacctaaaactgctctaaaaggtaaaatctattttaagaaaagccaatatcccttaaaacacttttgccccacaatgtgtttgaaacatgcaatttgactttactttccatgattttaataaaaaagacggccatggattatgggaaaaggtggttgagttatgctagatatgggcttttttttctctttttcacccagcattagatctaactgtgtactactgggaggaaatatataactaataagaaccagttaccaacactgttgtagtctagccgcaaataaagaataaaaggagttcaagaccagcccgaacaacacagcaaaactcttgtctctacaaaaaatacacacacaaaaattagccggtgtggtggcacacacctgtcatctcagctactcaggaggctgaggtgggagaatcacttgagcctaggaggtcaaggctgctgtgagccatgatcacaccactgcactccagtctgggtgacaaagtgagaccccgtctcaaaaaaaaaaaaaagtctgactctggctttagctttgtcatagatatactgatttaaccttcctgggctttgggtttttttaatataaagagactatctgtccttgggctacactcatggataacgtagagaggatgaacaaaagacggtctttaaaatgcttggaaagctcagacgcaggccaggtgcagtggctcatgcctgtaatcccggcacttcgggaggctaaaatgggcgggcagatcacctgaggtcgggacttcaagaccagcctggccaacgtggtgaaaccccatctctactaaaaatacaaaaatgagccaggtgtggttacacacacctgtaatccttgctacctgggagactgaggcatgagaatcacttgaatgcagtaaatggaggtggcagtgagctgggattgtatcactgcagcactccagcctgggtgacagagtgattctgtcttgaaataaaagctctgaactatccagaggctatacacactgtattgggagtgggaaattcattcaacaaatgtttcctctgtgtctgctatatcattaaggtagatactaccctgtctctatggaactatctatctagcaagtcagaaaataaaaatgatgatgggatatatacacagcacactgatacatgcgataccgactaggggaaaacgtggggtagaggaatcactgtaggtcaatctggtgtataagccttgagttggtggagaaggtagagatggcttgaggcaagaactacaccacggaaagtcccagagcaaagatgggggcagagggagcagctggtggggccactgtggggtacgaggatgatattagtcatctggtggggtctggaagtggcatcaaatccacaggacaacatggaaccattagagactggggaaccgatggtgaaaatttgattaaccacagaaccagtagagaactggcatctaccttgtcacatggcaaaattccaccgcaatcctctcagccatgcaccactcacgtggaaacatgcggccgtatttctcctcatagtccacaagctggcgttttatccaggcatagcgtctgtcgattttgtccagccaggcaacctggtgaaggtggagatcaaaagccaccccagtggttagaagtagaaatggcagttcaaggaaacaagcaaaaacacagagccaagcaaaagggaaccaacctctgtatttctcatggttttaaagaatctaggctacctttttaacttgattttttacttaaaaattcagaggtttttggctgggcgcagtggctcatgcctataatcccagcactttgggaggccgaggtcagcagatcacctgaggtcagttcgagaccagcctgaccaacatggagaaaccccgtccctactaaaaaatacaaaaattagcctggtgtggtgacaggcgcctgtaatcccagctacttgggagggggaggcaggagaattgcttgaacccgggaggcaaggttgcagtaaactgagatcgcaccactgcgttccagcctgggcaacaagagcgaaactccgtctcacacacacacacacacacacacaaaatccagaggtttttaacctggggtccatgattggccttcaggggtctatacatttccagaaactatatgcagaattttatgcacaggtgcatgtttctgaatttctccaaagggtcagtgacctcaaaatggttaagaactataaactcagcccctaggactcacagctcaacaaccaacactgtcagacagtcatgtaatacgaggtctaaattagtaggcttgacagcactcatgtttcaataaaattcaaatgttacatctgatcttatttggtcaatactcacatcttggttttcttgaaaaagtaccagatactctgacagatgctgtttaataaactttttgatgatttcctgtttgatcctgggatctagaatattagcaaccagacatgcatctcgtagaacattgctgggtcctcctggtctctagtaaaacaaacatgtaccaggtgaaaagccagaaacaacctttaaacctcatggcttctcacagccactacttgttatctctacgcattgtcagtcttactcctgctccttcacactcattctttctgctgtggctggatctgtcagttacctgctgctcctcgaggatggaatccttacactcgttttacagcaagcgacagaaaaactaccctgtgaatctgcaatgagatattttgggaaatgggcagtaatgatcacgggaaatttgactttctgcaaaccaaaactgaaagagatctaaaagtcagaatgccactggtctctgatgtcgcaagatgctgctgaagaggcctaagagtgggaatgccaccagcctctctcctaagagttggaatgccaccagcctcactccacatgtgccactcttccctgactccaacctctgggattcctgttcttaaagtgctatgtttttgccaaatagtgtggtctcccttaacacataaaaccaggttccaagccacgacatgtgtttcacaatagtgaactacctagaaaggcagccaaagagaaaatgctgtgatactggcctcctgacctgagcgaacactggaaagataccaggcgctgtactgacgcatcacgacgggaaggtctttgttaccaaaagcaattcaatgaccaaagttttgctgagactttctttacagtacgtcactgagtgaacatgactggctaagtggactacagtaaaaagaacacttggaatctactcctggcttggctaaaaagccatgcatgtagctttggagcacttgctcacctcatatgaaaaataatagactttaggtgataagtaaggttcttctaaatctttattttttgtcaactctttccaattccacccatctcaactgaagttccacgcttctaaagtgttatataagctgcctgagacctgagtttttaaaatgttgacttactccatgctgagtggtttttatgtcatctgctgaacaccctaacttctcaattctcacttcaggatgaaagtgacctgatagagaagtcatagatgccaaaacctatgggttcacgggttcagattttttcatttacaaagagtttactaggttgtgccttggaaaaatttttaaaaatcttaattcccacttgtgaaatggaaatagtaacacaaggcctttaagaaaagcccatagtctttaaaaagaaaactaggctgggagcggtggctcacgcctgtaatcccagcactttgggaggccaaggcaggcagatcatgaggtcaggagatcgagatccatcatggctaacatggtgaaaccccatctctactaaaaaaaaatacaaaaaaattagccaggcgtggtggcgggtgcctgtagtcctagctactcaggaggctgaggcaagagaatggcatgaactcggaaggtggagcttgcagtgagccgagatcgcaccacgacactccagcctgggcaacggagcaagactccatctcaaaaaaaagaaaagaaaagaaaactaaaaacaaaacaaaaaaaaaaccacacacacacacacacacacacacacacacacacacgaagtcactatgccagagaaaagggaggcatgttgttaaagagaaccattttaatttcatctgcccggtggaatctgggaaaaaaaatataaagcaggcctcttctaaacaataaagatgggcttcatccacatcttcctgaaacttctagaaactgaaatgagtggctgggcatggtggctcatgcctgtaatcccagcactttgggaggccgaggcgggcggatcacctgaggttgggagttcgaaaccatcctggccaacatggagaaaccccgtctctactaaaaatacaaaaattagccaggtgtggtggcaggtgcctgtaatcccagctatttgggaggctgaggcaggaatcacttgaacccagggggcggaggttgcagtgggctgagatcacaccattgcactctagcctgggccaaagagtgaaactccgtcaaaaaaaaaacaaacaaacaaacaaaaaaaaaaacctgaaacgggcagctgagtacacgtgaggctaaccttgtcctaagaagagcccagtgcttctcatgagcgaatatccccacaatcccttttcacttctttgaccttcattttcctcatgtaataaataggactaatggctttccaatatctactccctccctgcagttatatcagatgactaaggaatatgaggttctccaaggaaagtgctttacaaataagcatctgattactagcagacagccacaaaatgtgaagacattaaaatcaggagcgggcttcctatagaaagtgatgggcaaaagctggggccgctactcccacttacttcctacatttcttttatggaacacaaagaaaaaataattaagatatttccagttattgaattacagagcagatgcaggaaatgttccttggatcagtaaatgaatgtatgtccccatctctacccaccgagtagggtgaggctccttgcccctaagtgcttcagtatatttctgccttgaacaattctttctcttgaaatagctcaaacaatagagaaaaagtctcgtatgggttctttcctgtccgacacatgctaggcgctaagatggcatctgctacagttggaagggtggagctaaaagcagttccccaagcaggatggcagcttgttacatgagaagtgcaaccaacagctcccaagtgaaatgctgtgggctttgcagacacaacacaaacagctctgctaccagagagagctcaagggcatgaattccgaagagcaggcttatggtcagtaacagtgaggctcctcactatatcactctgagagttacataagatggtggatgctccacccagttgtcttttcaccaaaccaaaaccagtaagttatgtaacaatcctaaaaacaccgcggcatgaagatttcttttaaatacagccatgagaaaaaaggaattgacagggcatacaagatagacggtttgagacctacatcaaattaagcccaaacaaatcctctctttctgaggctggaaggaaacagaggaggaactgccaccacctagggacatttaaaatccagggtggtctcattaccctgaacctgcagcagaaggatttgcagctgccagcgagcatgactggaatgataaccacatggtgactggggtgagcgtgagctcggcaaggatggtgatcatctctaaagactggggaaacgcaaagcagtaccttggtgccctgggaaggaaacgcttcttcaaaatctgccaggatttgctgtcctaactcagtctgtgcagccttcactctgtgaggaagagagaacatatcatcacctggcatcatatccttatgtaactacacaccgatccacagggtcggaagggctgaagtctttcgagaaaggccaggaagggtacagagacgtccatgaggtgagaggtcacatactagttaagtgacaggttgatgagcaggacccaggcatccaagatattctcagggtgaatcttctatatccccaaaattcttctaggccaaccctttacctgaggtcatatgtattaatctttatacagttccactgggggatagtcatgctgtgggaaaatgttatagaatcacatccacatcaaatataaatctagctgggcgcagtggttcacgcctggaatcccagcatgtgggaagctgacgtgagagggtcgcttgagaccaggatttcaaaaccagcctgggcaacattagagagatccagtctccacgaaaaacaaactaaaataaaaagtacccaggtgcgggggcacacacctgtactcgggaggctgcggcgggaggatctcttgagcccaggacttttgaagatacactgagctatgatcacaccacagcactccagcctgggtgacagagggagaccttggctctaaaacaaaacactaacaaacaacaacaaataaatccactttggattactggtgtaactgctgtcctactccttggagtacagaatggcaagagggctccataatgttttagggtgttttgtaaaaaattattatgggtatataatcattatatatatatttatggggtacctgtgaagtcttgatacaggcatacgatgtataatgatcaaatcagggtaactgggttatcaatcaccccaagttatttgttacttctccgtgttaggaacattccaattccaatcttttagttatttttaaataaacaataaattattaaccgtagtcaccctattgttctaccaaatactagatcgtatcattctaactgtatttttgtgcccagtagccatcccagttactccccgcctccctgctatgcctcccagcctctgggacccagcgttctactcgctatctccatgagtttactttgaaaatgtttagcacccacatgagtgagaacatgaggaatctgtcttcccgtgtctggcttatttcatttcacatcacgtccagttcaatccatgcagctgcagtgttttgggtttcctgttaacccagaaaccaacaagctcgttaagtttttaaacaaataaatgaaaagaatgttttctaaggtaaaaacaaaaagagccaagtgacaaaatgaactgctaaatgatcactagtgagggccactgagtgaccatttaagttcagaagtttgtgaatatgaaaacggaactgcaaggaaaaccagctagaaaggggaggccagtactcaacagtggccgtgagtgtactaggagctcaagaactgtgcgtgtacttgaatgcaagggcagaaaggagaagcggctaggatggaaagcggctatggatcataccccacgatcaatcacgccccgcaatggatcaggccccgcaatcacgtcccgcaatcgatcacgccccacaatcgatcgcatgctgtgcatcccccacgagctgcctgatgttggtggccaccgtgcaccggccagccttgcagagagagagtggaacaagattctcaggccctgctgggcttcctgagcctgaggcaaatactgtctggttgctaaaaatgccttaaaagagcacacttccattctcggtctccaccctgttccttcagaattaactttatgaagtttctagaaatagcaacagctcaaaaccacaatttctttggctgctaaggagtgtctggcaacctgctgagattttttttcagatgaggggataggcatgacccaaaacaatctgttttttccgtggcgtggttacaattataccttattccaaatactttccaaggtttttccagtatcttcaaaacttttaaaaccactcttagaggtgggtttgtagccttttgagtcagttttcaaggaggccagaatgatccagacgaggctattactggaatagccgccacctccagattggaatcagggccatacgtctagagctgtccagcagacaatgggagacattccttcagcgtgaactttgacatgagagaaaagaataaaattgtacttcggagcttcttgtgatgcgcacacgaggaggcagcacacagcctgctgtggtgccaggtcacaggacagcttccagaggctcaggccccccctgttcctaccctcttcttggaagcacacacacagcaccagttccctcctaagccacagggaacttatagtaggaacttttcatggttagaagaggaaggagttctcctcacaggggaagtccagccgctagccagggcacccacagtcacattctcaggactactggccatctcaatgacactggtgggcccggctctgcccctggcccgaactatttgctactccatattcttggtgactctggaactgaggtggcagaaaggagagcctctggcccaaactattccctactctgaattcttggtgactctggaactgaggtggcagaaaggagaaccagagcctgtgacagcacctggtatcaccagagacaaaaaagaggaaaaattaccagtctctgatttgtagacttccttgccatgctcttcattttcatttttttacattaaattattatgtacaccttatttttttttattattatactttcagttttagggtacatgtgcacaatgtgcaggttcgttacatatgtatacatgtgccatgctgatgtgctgcacccattaactcatcatttacattagctatatctcctaatgctatccctcccccctccccccaccccacaacaggccccggtgtgtgatgttccccttcctgtgtccaagtgttctcattgttcaattcccacctatgagtgagaacatgcagtgtttggttttttgtccttgcaatagtttgctgagaatgatggtttccagcttcatctgtgtccctaaaagggacatgaactcatccttttttatggctgcatagtattccatggtgtatatgtgccacattttcttaatccagtctatcattgatggacatttgggttggttccaagtctttgctattgtgaatagtgccgcaataaacatacgtgtgcatgtgtctttatagcagcatgatttataatcctttgggtatatacccagtaatggggtggctgggtcaaatggtatttctagttctagatccttgaggaatcgccacactgtcctccacaatggttgaactagtttacattaccaccaacagtgtaaaattgttcctatttctccacatcctctccagcatctgttgtttcctgactttttaatgatcaccattctaactggtgtgagatggtatctcattgtggttttgatttgcatttctctgatgaccagtgatggttagcattttttcatgtgtctgttggctgcataaatgtcttcttttgagaagcatctgttcatatccttcgcccacttcttgatggggttgtttgtttttttcttgtaaatttgtttgagttatttatagattctggatattagcccttcatcagatgagtagattgcaaaaattttctcccattctgtaggttgcctgttcactttgatcatagtttcttttgctgtgcagaagctctttagtttaattagatcccatttgtcaattttggcttttgttgccattgctttaagtgttttagacatgaagtccttgcccatgcctatgtcctgaatggtattgcctaggttttcttctagggtttttatggttttaggtctaacatttaagtctttaatccatcttgaattaatttttgtataaggtgtaaggaagggatccagtttcagctttccacgtatggctagccagttttcccagcaccatttattaaatagggaatcctttccccatttcttgtttttgtcaggtttgtcaaagatcagatggttgtagatgtgtggtattatttctgagggctctgttctgttccattgatctacatctctgttttggtaccagtaccatgctgttttggttactatagccttgtagtatagtttgaagtcaggtagcatgatgcctccagctttgttcttttggcttaagattgtcttggcaatgcgggaccttttttggttccatatgaactttaaagtagttttttccaattctgtgaagaaagtcattggtagcttgatggggatggcactgaatctataaattaccttgggcagtatggccattttcacgatattggttcttcctatccatgagcatggaatgttcttccatttgtttgtatactcttttatttcattgagcagtggtttgtagttctccttgaagaggtccttcacatcccttgtaagttggattcctaggattcccaaattcctagttggattttattctctttgtagcaattgtgaatgggagttccctcatgatttggctctctgtttgtctgttattggtgcataagaatgcttgtgatttttgcacactgattttgtctcctgagactttgctgaagttgcttatcagcttaaggagattttgggctgaaacgatggggttttctaaatatacaatcatgtcatctgcaaacagggacaatttgacttcctcttttcctaattgaataccctttatttctttctcctgcctgattgccttggccagatcttccaacactatgttgaataggaatggtgaaagagggcatccctgtcttgtgccagttttcaaagggaatgcttccagtttttgcccattcagtatgatattggctgtgggtttgtcatagatagctcttattattttgagataagtcccatcaatgcctaatttattgagagtttttagcatgaagggctgttgaattttgtcaaaggccttttctgcatctattgagataatcatgtggtttttgtctttggttctgtttatatgatgaattacattttttgatttgcatatgttgaaccagccttgcatcccagggatgaagcccacttgatcatggtggataagctttttgatgtgctgctggatttggtttgccagtattttactgaggatttttgtgccaatgttcatcagggatattggtctaaaattctctttttttgttgtgtctctgccaggctttggtatcaggatgatgctggtctcataaaatgagttagggaggattccctctttttctattgattggaatagtttcagaaggaatggtaccagctcctccttgtacctctggtagaattcggctgtgaatccatctggtcctggactttttttggttggtaggctattaattattgcctcaatttcagagcctgttattggtctattcagggattcaacttcttcctggtttagtcttgggagggtgtatgtgtccaggaatttatccatttcttctagattttgtagtttatttgcataggggtgtttatagtattttctgatggtagtttgtatttctgtgggatcagtggtgatatcccctttatcattttttattgcatctatttgattcttctctcttttcttctttattagtcttgctagcagtctatcaattttgttgatcctttcaaaaaaccagctcctggattcattgatttttttgaagggttttttgtgtctctatctccctcagttctgctctgatcttagttatttcttgacttctgcgagcttttgaatgtgtttgctcttgcttctacagttattttaattgtgatgttagggtgtcaattttagatcttttctgctttctcttgtgggcatttagtgttataaatttccctctacacactgctttaaatgtgtcccagagattctggtatgttgtatcttgttctcattggtttcaaagaacatcttcatgtctgccttcatttcattatgtatccagtagtcattcaggagcaggttgttcagtttccagtagttgagtggttttgagttagtttcttaaccctgagctctagtttgattgcactgtggtctgagagacagttcgttataatttctgttcttttacatttgctgaggaatgctttacttccaactatgtgatcaattttggaataagtgcgatgtggtgctgagaagaatgtatattctgttgatttggggtggagagttctgtagatgtctattaggtccgtttggtgcacagctagttcaattcctggatattcttgttaactttctgtctcattgatctgtctaatgttgacagtggggtgttaaagtctcccattactattgtgtgggagtctaagtctctttgtagtttctaaggacttgctttatgaatctgcgtactcctgtattgggtgcatatatatttaggatagttagctcttcttgttgaattgatccctttaccattaagtaatggccttctttgtctcttttgatctttgttggtttaaagtctcttttatgagagactaggattgcaacccctgcctttttttgttttccatttgcttggtagatcttcctccatccctttattttgagcctatgtgtgtctttgcacatgagatgggtctcctgaatacagcacaccgatgggtcttgactcttgagccaatttgccagtctgtgtcttttaattggagcatttagcccatatacatttaaggttaatattgttatgtgtgaatttgatcctgtcattataatgttagctggttattttgctcgttaattgatgcagtttcttcctagcatggatggtctttacaatttggcatgtttttgcagtggctagtaccggttgttcctttccatgtttagtgcttccttcaggagctcttgtagggcaggcctggtggtgaaaaaatctctcagcatttgcttgtctgtaaaggattttatttctccttcacttatgaagcttagtttggctggatatgaaattctgggttgaaaattcttttcttcaagaatgttgaatattggcccccactctcttctggcttatagagtttctgccgaaagatccgctgttagtctgatgggcttccctttgtgggtaacctgacctttctctctgactgcctttaacatttttttccttcatttcaactttggtgagtctgacagttatgtgtcttggaattgctcttctcgaggaatatctttgtggtgttctctgtatttcctgaatttgaatgttggcctgccttgctaggttggggaagttctcctgaataatatcctgcagagtgttttccaacttggttccattctccccatcactttcaggtacaccaataagacgtagatttggtcttttcacatagtcccgtatttcttggaggctttgttcatttctttttactctttattctctaaacttctcttcttgcttcatttcattcattcgatcttcaatcactgataccctttcttccagttgatcgaattggctactgaagcttgtgcgctcgtcaggtagttcttgtgccatggttttcagctccattaggtcatttaaggacttctctagactggttattctagttagccattcgtctaatcttttttcaaggtttttagcttctttgtgatgggttcaaacttcctcctttagctcagagaagtttgatcgtctgaagccttcttctctcaactcgtcaaagtcattctccgtccagctttgttccattgctggcgaggtgctttgttcctttggagggggagaggtgctctgatttttagaattttcagcttttctgctgttttttccccatctttggggttttatctacctttggtttttgatgatggtgacgtacagatggggttttggtgtggatgtcctttctgtttgttagttttccttctaacagtcaggaccctcagctgcaggtctgttggagtttgctggaggtccactccagatgctgtttgcctgggtatcagcagcggaggctgcagaatagcaaatactgctgaacagccaatgttgctgcctgacttcgtctcagaggggtacgtggctgtgtgaggtgtcagtctgcccctactggagggtgcctcccagttaggctactcgggggtcagggacccacttgaggaggcagtctgtccattcttagatctcaaattctgtgctgggagaaccactactctcttcaaagctgtcagacagggacatttaagtctgcagatgtttctgctgccttttgtttggctatgccctgcccccagaggtggagtctacagaggcaggcaggcctccttgagctgtgctgggctccatccagttccagcttcctggccactttgtttacctgctcaagcctcagcaatggcgggcgcccctctcccagccttgctgccgccttgcagtttgatctcagactgctgtgctagcaatgagcgagtctccgtgggtgtgggacccgccgagccaggcaccagatataatctcctggtgtgccatttgctaagactgttggaaaagtgcagtattagggtgggagtgacccaattttccaggtgccgtctgtcacacctttgcttgtctatgaaagggaattccctgaccccttgcgcttcccgggtgacgcgatgccctgccctgcttcagctcatgtttggtgggctgcacccactgtcctgcacccactgtccgacaagccccaatgagatgaacctggtaactcagttggaaatgcagaaatcacccgtcttctgcgtcgttcaagctgggagctgtagactagagctgttcctattcagccatcttagaactgcctatgtcgccatgttcttcattttcaaagtcacctcttgagataggctggacctggttatgttactagtgagccgcataatcacaagtcacttcctctctgtgggtcacaactttgaatagctgtgaaataagagggtggggctagcagcccatactagatgattctgtgtcctctccagtactgattattccacaacacccatcttacggtgctaactggctttacaggtggctagaggttagatgtatgcttaatcctggagcagaaggatacgcatataaatgtcaatgtttccaacagcagtttttttctttgttttttttttgagacgaagtctcactcttgtctcccaggctggagtgcaatgggataatctcggctcactgcaacctccgcctcctgggttgaagggattctcctgcctcagcttcccaagtagctgggattacaggcgcctgccaccacgcctggctaattttttgtatttttagtagagacagggtttcaccatgttggccaggctggtctccaactcctgatctcaggtgatccacccacctcggcctcccaaagtgctgggattacaggcgtgagtcactgcgcccagcctctaccaatagcagtttgtgaagtggctatcaatgactcagatgaaagcaactattcccttacagacatcactgatggtatctatagacccaaacctcaatcccatgcattttcagggtaagatgtgaatttcagtctttataagcaattgcttaaataggattctagaaagaagtcaacagacttgaaagaatttatctttggcctcattcctttaaactccttcctcttctaaccatgaaaaggttcccactacaaagaggtagctcaactgataactgtcagcaaagcacatatatgtgccaaactaccaagatttcctagtcattcctttcttttcagactggagtacagtggtgcatttgtggctcactgcagcctcaacctcccagggttaagtgatcctcccttctctcagcctcctgagtagctgggactataggtgtgcacctccatgcccagctaattcttgtattttttgtagagatggagttttgccatgttgcccaggctgatctcaaactcctgggctcaagcgatctgcccacttcagcctcccaaagtgctaggattacaggcatgagccactgtgcccaactgatttcctagccattcttgtgaaagtccgcctacaactcatagagaacagggaaaacaaaaattcctcctggcatccacgtaagttcagcctgttgcatggtggcaaccccaaatgggtcactcttcagaaacaaaagattcattgtgctgcccagaaaggaaagtcaaccaggtggtttctggcatcctccatgccacgtgactgcagggctgttccaaggcaccctttcctaaaagtgttctcagcttttcgtaagggggagtcacagacagacagcaaattatgaacattgttcagatatctgtggataaagtagccctgagacttttgttaccttgtgagtgacagtcccaaagaaaacacccccaacagttcccaaataaatataccgccctcccaaaccacagtcttctaaacagcagggttaattagtcaaatgctacagttccaaacagacaccataaagaatctcagcctagaatcttgagtgaccccatgagacacttctgagatcaccaaggacaacactcatacttggcaaccgaggacaacactcatacttggaaagcgaggacaacactcatacttggaaagcgaggacaacactcatacttggaaagcgaggaaaacactcatactcggaaaccgaggacaacactcatacttggaaagcgaggacaacactcatacttggcaactgaggacaacactcatacttggaaaccgaggacaacactcatacttggaaagcgaggacaacactcatacttggaaagcgaggacaacactcatacttggaaatcaaggacaacactcatacttggcaactgaggacaacactcatacttggcaactggggacaacactcatacttggaaagcgaggacaacactcatacttggaaagcgaggacaacactcatacttggcaaccgaggacaacactcatacttggcaaccgaggacaacactcatacttggaaagcgaggacaacactcatacttggaaagcgaggacaacactcatacttggaaatcaaggacaacactcatacttggaaagcgaggacaacactcatacttggaaagcgaggacaacactcatacttggaaatcgaggacaacactcatacttggaaatcgaggacaacactcatacttggcaaccgaggacaacactcatacttggcaaccgaggacaactctcatacttggaaagcgaggacaacactcatacttggaaagcgaggacaacactcatacttggaaagcgaggacaacactcatacttggaaatcaaggacaacactcatacttggcaactgaggacaacactcatacttggaaaccgaggacaacactcacacttggaaagcgaggacaacactcatacttggaaagcgaggacaacactcatacttggaaagcgaggacaacactcatacttggcaactgaggacaacactcatacttggaaaccgaggacaacactcatacttggaaagtgaggacaacactcatacttggaaagtgaggacaacactcatactgggaaaccgaggacaacactcatacttggcaactgaggacaacactcatacttggaaaccgaggacaacactcatacttggcaactgaggacaatactcatacttggaaagcgaggacaacactcatacttggaaagcgaggacaacactcatacttggaaatcaaggacaacactcatacttggaaatcaaggacaacactcatacttggcaactgaggacaacactcatacttggaaaccgaggacaacactcatacttggaaaccgaggacaacactcatacttggcaaccgaggacaacactcatacttggaaaccgaggacaacactcatacttggaaagcgaggacaacactcatacttggaaagcgaggacaacactcatacttggaaagtgaggacaacactcatacttggaaagtgaggacaacactcatacttggaaagcgaggacaacactcatacttggaaatcaaggacaacactcatacttggcaactgaggacaacactcatacttggaaaccgaggacaacactcatacgtgtcaacccaggaggcccaggaggaacttgtcgaggccatagagctgtgcaggcctgtccatttccaggttgagttcttttttcactccatcatgagacctgccaagcctttctcacatttataagaggttagaaatggctgtgaaaaatatattttcgttcaagagtttcatggttttcaagagaatgtaaggctcttccattcttcattgggagatactgactgatgactagaaacattccctttcacggatatgcttaggccaggaggatttgaaatgtaaagatgctaaagaaaaaactctttcctccaatgctacattaagcatggaagcatttgccagaagggtagttggaagaattagctatgctcaaatcaaggctcatgaacttcctatttcaaatgtacaggcaaagatttcagaacacaacttttcacatgacttctacactttacagacagcaagacagtaaatttgagaaacggaagcaatgcagagggtggtaacccgcctgccatctcccgccccttacaacaaatagctatttctctcatttccagatggttctaccatcagcacgtaaacataagggaagcaaattcaccagaaaggatgctaaaaataagaagtctggacttttctcaaacgtttagtacctcttaaaaaaacaatcctagtcaagcactgaaaataaaaataagaagttgtctcctcttgtgctctttttagtgttatttttttttttcccccgagacgggtctgctttcttgcccaggctggagtgcagtggcacagtctcggctcactgcagcctccacttccggagctcaagtgatcctcccatttcagcctcccaagtaactggaaccacaggcacacatcaccacaccagctcactttttgtatttttggtagagacagggtttcaccatgttgtccaggctggtcttgaactccagagctcaagcgatctgcctgtctcagcctaccaaagtgctgggactccaggtgtgagccaccatgcccagcctttttagtgttacttaatagcacatattctgtattaacctacacaaaattattgcaaatagagattgcgaaatgaactaaaagataagtaaatcctcctgtgtttgcagcaaccttatgtgataatgaatgtttggagcactgaaatatattcatagaatgttggactttctatttttcaggaatgtgattataacagtgattattaagttccttcaaatttttaaaactacctctttaaacaaatgttgaaaagcaaagagcccaccaaaagtacaggcagcaaaagcaaaaagaaacaagtgggactacatcaacctaaaaagcctgttggagaaatgcaggtggaaaccacaatgcagtgtcacttcacgtcctaacgggggcatcttttcatgtttattggccatttatttatcttctttggagaaatgcttattcaaatcctttgctggttttttaattgagttgtttggctttttgttgttgatttctgggaattctttatatattctagatattaatccattatcagataaatgatttggaaatattcttcccattctgtgcattgccattttaccctgctgatagtgttttttcatgcacaagttttaaaatttttcataaagtcccatttatctatgttttccttttgttgcctaggactttggtgtcatatccaagaaactgctgccaaatacagtggtgtgaagatctggtcttcgttttcttctaagagttttagaattaggttttacatctaggttacagatccattttgagttattaacgaatccctatgctggtttctgccaaataaaagttagttctgtcatgttcctgccatgcacaaccccttcctttataccgactggagataggctcccacacacatctccgtgaccgtgtggccactgcctcctaagggtcttatcttttctaatccatatcacggactggagactggctcttacacacatctccgtgaccgcgtggtctctgcctgataagggtcttatcttttctaattcataccacggactggagactggctcccacacacatctccgtgaccgtgtggccactgcctcctaagggtcttatcttttctaatccatatcacggactggagactggctcccacacacatctcggtgaccgcgtggcctctgcctgataagggtcttatcttttctaattcataccacggactggagactggctcttacacacatctcggtgaccgcgtggcctctgcctgataagggtcttatcttttctaattcataccacggactggagactggctcccacacacatctccgtgaccgtgtggcctctgcctgataagggtcttatcttttctaatccataccacggactggagatcggctcccacacacatctccatgaccgcgtggcctctgcctgataagggtcttattttttctaatccatactacggactggagatcggctcccacacacatctccgtgaccgtgtggccactgcctcctaagggtcttatcttttctaatccataccactgactggagattggctcccacacacatctccgtgaccgcgtggccactgcctcctaagggtcttatcttttctaatccgtatcacggactggagactggctcccacacacatctccgtgaccgcatggccactgcctcctaagggtcttatcttttctaatccacaccactgactggagatcggctcccacacacatctccgtgaccgcgtggccactgcctcctaagggtcttatcttttctaatccatatcacggactggagactggctcccacacacatctccgtgaccgcgtggccactgcctcctaagggtcttatcttttctaatccacaccactgactggagatcggctcccacacacatctccgtgaccgcgtggccactgcctcctaagggtcttatcttttctaatccatatcacggactggagatcggctcccacacacatctccgtgaccgcgtggccactgcctcctaagggtcttattttatccagactcctgtacctctataatccactagacttttacaaaatacaagtgagatcatgccccccgcacttaaaatctttcactgtccacaaaataaaaaataaattatttagcaaggcatataaaacctgacccgatctacctatgcagccctgtctccctctgctgcctccaaactccatgagactccctcttccttctttcccccattactgtcacgttggtaagatcccacccattcttttaagattcagattaaaacagaatttgtctatgacccctgccctcagcccctgcttcagcctatcaattcctcttctgagatcctgctatgccttgtacagcatataccagttttgttacatctgttatactggaatcttctattaatgtctttcttctccatacaaaaatggtgaactctttgaaggcagagagtgtgtatttcttatctttgtgccttcagtccccagcacggggcctaggatgtagaaaatgcagagtaaatatctatcatgcaaatgaagaaaagaacaaatgaatatgaaagagatcaactctgaatcatcctgagagcaggggtagaagggactgccttcctcctcccccatccgctgacagcaaatctgcctgctccatccaggctccttctttcttgcagctcataaagtcctgttcgcctgctttcttggctgcctcacagtccagtctgataaggtgatcagctggctctaggtgtgaggggtaggaaggatgagggaaagggtggcgatttccctagcgttctgccaagctcggcaagatgcacactgagcacacgttgcaacctcccattcctgccccggagcgtcagaaataataaaaagattttcatgaaaatccaaatccagacaagaaaagtggtatactagaagcctgaggacttcctggtaggaaggatgacagaaaatcactgcccaaaaatgcttctcgaaaatgaaagacatgaaggtggcgataccaggagcaggatggggccgctgtccgtgtctgcacccacaccgtgaatgcgtgaatgctcacgtcaggcggcaggggtgggcctctgggtctgagaacttcagcagtagccagaggggcggccaacacccaagaagaccagggagcctccaagcctaggagatcagctgctgggacacccacctggcaggtttctccaggtctggcccccctcactttggaaaagctgtctgtgatacacttagccaagtagcaattcccatttctcgcccacgagcaggtagcagtaaaagagcattcttgatcagactaatagagaatgtcaaaaataaaaataaggccgggcacggtggctcacacctgtcatcccagcactttgggagactgagacaggtggatcacttgaggtgtcaagagttcgagaccagcctggccaacatggtgaaaccctgtctctactaaaaatacaaaacttagctgggcatgggtggtgggcgcctgtagtcccagctacttgggaggctgaggcaggagaattgcttaaacccaggaggcggcgattgcagtgagctgagattgtgccactgcactccagcctgggcgatggagtgagacttggtctcaaaaaataaacaaataaaataaaaatgaggtttcagctaagaatcactaaacatttgagaaatgctaaagagaaagaattgccatgctgaacaaactgaagatcttacactggaggacagaggaatggaacaggcactgaagatcttacactggaggacagaggaatggaacaggcactgaagatcttacactataggacagaggaatggaacaggcactgaagatcttacactggaggacagaggaatggaacaggtaatgaagatcttacactggaggacagaggaatggtacaggcactgaagatcttacactggaggacagaggaatggaacaggcactaagatcttacactataggacagaggaatggaacaggcactgaagatcttacactggaggacagaggaatggaacaggcaatgaagatcttacactagaggacagaggaatgaacaggcaatgaaaatcttacactggaggacagaggaatggaacaggcactgaagatcttacactggaggacagaggaatggaacaggcactgaagatcttacactggaggacagaggaatggaacaggcactgaagatcttacactggaggacagaggaatggaacaggcaccgaagatcttacactggaggacagaggaatggaacaggcaccgaagatcttacactagaggacagaggaatggaacaggcaccgaagatcttacactggaggacagaggaatggaacaggcaccgaagatcttacactggaggacagaggaatggaacaggcaccgaagatcttacactggaggacagaggaatggaacaggcaccgaagatcttacactggaggacagaggaatggaacaggcaatgaagatcttacactggaggacagaggaatggaacaggcactgaagatcttacactggaggacagaggaatggaacaggcactgaagatcttacactggaggacagaggaatggaacaggcactgaagatcttacactggaggacagaggaatggaacaggcactgaagatcttacagtggaggacagaggaatggaacaggcactgaagagcttacacttgaggacagagaaatggaacaggcactgaagatcttacactggaggacagaggaatggaacacgcactgaagatcttacactggaggacagaggaatggaacaggcactgaagattgtacactgtaggacagagaaatggaacaggcaacccagtgctttaacaaacacataatttctattccgtgggagagacatgagaatattatgcccatgagaaaagaatcagctagatatgctggaaattaaaaagctggatttttaaaataaaaattcaacagctgggccaaatagcacaatggatgcaagtgaagaataaattaaaataggaagactgggttgaggaattctttcagaaagcagttcaaaaggacaaagagacagaaagcatgaaaggaaaattaagagacatggcagcagatctagaagatccaacgttcacgtaacaagaattccacaaggaaagaatgcagagaccaagttgtagagactactcaaagaaaggaataaaggagaataatttcttagagtatgagaaactcatgagtgtttagaggaagaagacaactggggctaggtacagtggctcacgcttgtaatcccagcactttgggaggatgaggcaggaggatcacttgagcccaggagttgaagaccaacctgggcaacataagaagatcccacctctacagaaaaatgttaaaaatcagccaggcatggtggtatttgcctgtattcctggctactcaggaggtggaggcaggaggatggtttgagcccaggagttccaggttgcagtgagctatgaccacgccactgcactccagcctgggcaacacagcaagactccgtctcaaaaaaacaaaacaaaacactaatcttactagctacaaggaaaatgaaaattaaaggaaccggataccgttttcaaccataagatagataaaaatgaaaaacaacaatatcaagtgttgctgagggtaagggtgctctcatacagtacagatcgtactacaagtatataaagctttgctggagggcaaatgggcagtagctactaaaattttaaatgtatacaaacctataacccagaatctgtcccagagaaatacttgcatatgtgcaaaagggggcatattttaagaattagaaacaacgacctagtgctaccaaaatggtgaaataatctgtggtatgtcacgctatggggttctgtgcatcaattccagagaatgaagcaggtttatacatactgatgagaaaaaaaatatctaaaatacatgtggttgaaaacaaaaagcagtttttagaataaagcgtaaggcatgaaaccatttagttaaaacaaaacaaagcaaaaacaaagccattaactgaaactatagatttatataaatacacacacaaatccggagagataggattaaaactatagatttatgtaaatacacacacaaatccagagcgatagccactgaaactacagatttatgtaaatacacacacacaaatccggagcgatagccattaaactacagatttacgtaaatacacacacacaaatccgcagtgatagccattaaactgataacaattaccacctctgaggacaacaatgggattctgaagtctaggtaaagggaacttaggtttcacctgtatacatatttgacctttttaaacaatagaagatgtggaaccaggtgcagtggctcacgcctgtaaccccgatgcactgggagcccaagaccagccctgggccacagagtgagaccctgtctctacaaaaaagtaacaaagttagttgggtgaggtgctgcgtgcttgtagtcccagctgcttgggaaactgtggtgggaggatcacttgagcccaggagttccaagctgcagtgagcagtaattctgccactacactccatcctgggtgacagagtgagaccctgtctctattttttaaagtctatgtgtattacttatataattacaaataaggaaacttaaggaaaacaaagaagcctgtagcattcgggccttattaagaaggcagagtcagaaacgtagctgctgctcagtaacaacgccttcatttcttctttgctgcaaggaaggttagaatttgtcaattgtgacggtctctgccttctcagtgttcttcctgcccctccttctaacagaaaaggtggtgcatcaactcctcctcgtcctcccttggaatcctcatcctccttcgctctgagaaattactttcctttccactggatctgaatctgggattaaaactcaacagcaataagaaggaaagaataaggttggggggaaagtcatctttttatcgtatctaaagtttttgtggttcactgtatttttttttttttttgagtctcaccctgtcgcccaggctagagtacaatggcaggatctcagctcactgcaacctccacttcccaggttcaagtgactcctgcctcagcttcccgagtagctgggattacaggcacctgccaccatgtccagataatttttgtatttttagtagagacggggtttcgccatgttggccaggctggcctcgaactcctgacctcgggtgatccacccgcctcggcctcccaaagtgctgggattacaggtgtgagccaccatacccggccgtggctcactgtattttctaaagaccgccacagcaatctatcccatcccacatgctttttgtaacaatgtgactttgacattcctcccgttagtgggtgggagaagactatgttccttcctcttgaatcttagcagccttgtgactatggcagaagtgatgctatgaaatttccaaggcttggttctcttgggacgctcattcttggaaccagccaccttaccgtgaggaagtccaagcagcccgtggaagacaacaaagaatcccagcaacggcctggccaagctcccagctgacagcaagcaccaaggagccagccatgagagtgagccaatgcattctccagtcccctcctgagctgcctcggctaatgctgcacggagcagggatgagctggtccccgagccaggccaaattatacgtgcaaaacaattattgttttaagctactaagttttgtgctggtttgttacaaagaaatagatacctagaacagtttctctcacaaatggggacaactgagagttgtccatatatacaactgtaactatctaccacaggcagctttggaagacatgggaaggggtaaagtgggggaacgtctgcaccagacagttagatcaggtagcatctgatattccttcacacactaagactctgcagtgaacacgctgagctaagtgcttaagcacttcctagcaccaggtccttttctgaaagcaagatcacttcttccggtgacagtttaccttttggaaagtttagctgccggatctgcggaatccccatatactttccctccagtgacagtttacctttcggaaagctgccggatctgtggaatccccatatactttccctccggtgacagtttaccttttggaaagctgccggatctgcggaatccccatatactttccctctggtgacagtttacctttcggaaagctgccggatctgcggaatccccatatactttccctctggtgacagtttacctttcggaaagctgccggatctgcggaatccccatatacttgtggaagtgctccaggacattcatcacaccctgaaggagattagcaacttctccgtattgtcttcgcctggtcatggctctgcaaggaaagaataagtttaaaagtctagaaaaacactaaagacgcaagatacagacacagaacaacccacgctagctctcaaacagatatcaactcagctgaatcaacgttcgctgagcactgagtatataagctgctgtgcgttgtgggaggaaaaaacaggatctggtccaaatcctcaaggtgacaccatatagtaagggagagagtcaagtacacatctaactagtatcaaaaaggatgaactatgttctaaacagaagtacaaattatgtgctacggcaggaagaatgtgtgagtgatgaattctcatttggtgtggggaggggaatctgggaagacgatgaatttagaatttgggttggatattatgggattagcaagcttgggacagagaaccggggtagggatgttactatctgaggattacagcctatgagcaaaccaaacacaaagggtgcggccaggcgcggtggctcagcctgtcatccccgcgctgtgggaggccgaggtggctcacgcctgtcatacccacactgtgggaggccgaggcgggcagatcacgaagtcacgagatcgagatcatcctggccaacacggtgaaacaccgtctctactaaaaatacacaaaattagctgggcgtggtggtggatgcctgtaatcccagctactcgggaggctgaggcaagagactcacttgaacctgggaggcggaggtttcagtgacccgagatcgtgccactgcactccagccagggtgacagtgggagactccgtctcaaaaacaaaaacaaaaatacacaaagagcagcactttacctattaactgaaatctgtaggttctaaggcgtctgtatcacagacctctactttccctactgctaaggttaatgacgcttaaataaaaggatgctgataaaatcaagttacacacagggaggaaatataaactattagatctaaatttttcattagggttgggttatttcattaaatttgtaatttatgattttccataagaagcattgaaaaagacaggattggccgggcgcggtggctcaagcctgtaatcccagcactttgggaggccgaggcgggcagatcacaaggtcaggagatcgagaccatcctggctaacacggcgaaaccccgtctctactaaaaatacaaaaattaaccgggcttagtggcgggcgcctgtagtcccagctactcgggaggctgaggcaggagaatggcgggaacccgggaggcggagcttgcagtgagcctagatcgcgccactgcactccagcctgggcgacagagccagactccaactcaaaaaaaaaaaaaaaaaagaaaaaagaaaaagacaggatcaagttcaagccaaggtgttccgttgctaccaccacctggttttaccaccgcctggtcttaccaccgcccagtcttaccactgcctggtctgatggtttggtggacaccgaccaccccacgaaggaacaaatgtgaccgccctctggcctccctctggccgctgctctcactgctcacaggagagtggaccaggcatccctggagctcatccaatacctagagaggtcaggaaggggcccgcccctcctcctctttccctcaaggcactctcccacttcccccacccaggactttgaatgctgcatctcagtttctatgacgatgcgctttccctgtccacatacggaatcacactgaggctggagcagggggagtccccagcctgagacgggccacagaggtgagctggagtgtcagaatcttgctagtaaaggaggctttagattgctcctttgtagtaaatcaccagctcttccttctctatttctaatgttctgatgtatcattccctctacaagccaaacggaaatctactttataaaaaaaagtggtttgaatgattgagttctgtctcatagggtctcttccatgacagtgcaactcagcccaacgcaagcaggaaacctgctgaggcagaagcagcagggagtgaatatgggcctgtgtcactctgtctgcctggagtgaatatgggcccgcgtcactctgtctgcctggagtgcatatgggcctgtgtcactctgtctgcctggagtgaatatggccctgtgtcactctgtctgccttgatggtacagagccacagcctgaagatgggccatattcttggagtcgtcctgaaaggcttctggggtccccttttgactagctgccagtgtttgttaggttctgaacaccagagggcacaaagcaaaaatggtgactgaacacttgaagccaatttgcagaaagtggggcaggatggtgagactttcctggctgagaagtaaataggcgacaacaccattttctctatgcgatacatttcccgtggccccaaaagagaaagttggcattgcttactcgagggagtcgacacctcctgccagcatgtgcaggtggttcagtgtggtgattgaggtggtcaggtggcgtttggcgtgatctaattgcttaatatcacgggtgatttctttcacctaaacattgaaaaaccacaagaaagaaaggaagacggtcaagaaagatgtaaaacacttctgcaagtagctctgtaagaaacgaatgcagatgaagcagggaaaaatctcaggttagcaaacattctcacaatacaaaataaaaataatttccaaccaggcatttaaaatttaatgtggcatctctttggactttactcagggttataaaaccttcagttgtgagcatgaaatgaactttatttttttaccccaaatgaaatgatccaaacagcaattcagtattgagcacacaggacagaggaggtaagcacagcacctttccttgaacaaggtgaggaaagtgtgccttctggtgatgaagccgctgggccatataaaacacctatcagtcagtactaggtactcagacggtctttactaatggaatgagggcctgagcttccagcaaagaagactttcaaatctcaagaagattgaaatataagctctgtaacatacgcttaacatgtaagttactaggagggcaggagcagtcttcagggagtgagaaggcaatttggggagtaagagcctgacagtgttgtttcagcaggtccaagagaagagaagctgtctctgggaatgcaagtatatttcagtcaccagaaaagcatattcaatagagaagttggaaaaattccccaactttactaacacccaggtgaaatcatccactgtgtttcttggtccatgctgactaagaaatgtgtgtgtgtgtgtgtgtgtgtgtgtgtgttttatcatgccacattatttttaattacgtacaaagatctaacatgtcacccacggaccatttcacccgctgctctgtttggccgccagtctcttgtctctctcttcagcaatggtgaggcggataccctttcctcggggaagagaaatccatcgtttgttgcccttgccaatagtgaaaatgttggaaacttgagtgccaaagctgttgccactggtgtctttcacatgaaccacgtcagaagatcccgggtacctctctctgttggggatcacaccaactcttcccaggtgagcacctccagtcaccatatatggcttgccagtgtcgaacgtgatgaaatcggtcatcttgccagtctccaaatcaatctgaatggtgtcattcaccttgatgaggggtcagggtagcggatggtgcgagcatcatgagtcaccagatgagggattccttttgtgcccacaaagatttttctcactttgcacaacttgtacttggtctcctcaggtgtacagcaaagcaacctttggtgtcacggatcagatggaaattctctcctgtcttgtcaatgctgatgacatccatgaacccagcagggtatgttatatcagttcggaccgtgccatcgatcttaatgaaccgctgcatgcaaatcttcttaagtctgttccttaggaaaatgatgaggggaagacactctctcaacttgtggggactggtggacggacgaggagcaaacacaccggtcaatttatccagcatccaatgctttggagctgctacccgcttcagatgcttcttggcaccacgagccatggctgcattaggcaaggaaaagaggacctttgtcttccggtgcacatagcgaaagtttcttaatagcaatttggttgcccaggttctgtgatacctggaaggaagggagtgccctggataccaaacacaaatactgtagtcactggatagatacatcccattaaagtgagtaacttggccatgagttcatggatagatacgtcctcattaaagtgagaaacttggccgtgagtttgtggatagatacatcctcattaaagtgagaaactcggccgttgaggtcgtggatagatatatcctcattaaagtgagaaactcggcagggagttcgtggatagatacatcccactaaagtgagaaactcggccgtgagttcttggatagatacatcgcactaaagtgagaaactcggcagggagttcgtggatagatacatcccactaaagtgagatactcggccgtgagttcgtggatagatacatcccactaaagtgagaaactcggcagggagttcgtggatagatacatcccactaaagtgagatactcggccgtgagttcgtggatagatacatcccactaaagtgagaaactcggcagggagttcgtggatagttacatcccactaaagtgagaaactcagcagggagttcgtggatagatacatcccattgaagtgagacactcggccgtgagttcgtggatagataacatcccactaaagtgagaaactcggccgtgagttcgtggatagatacatcccactgaagtgagacactcggccgtgagttcgtggatagatacatcccactgaagtgagaaactcggccgtgagttcgtggatagatacatcccactgaagtgagaaactcggccgtgagttcgtggatagatacatcccactgaagtgagaaacttggccgtgagttcgtggatagatacatcccactgaagtgagaaactcggcagggagttcgtggatagatacatcccaccaaagtgagaaacttggccgtgagttcttggatagatacatcgcactaaagtgagaaactcggcagggagttcgtgggtagatacatcccactaaagtgagatactcggccgtgagttcgtggatagatacatcccactgaagtgagacactcggccgtgagttcgtggatagatacatcccactgaagtgagacactcggccgtgagttcgtggatagatacatcccactgaagtgagaaactcggccgtgagttcgtggatagatacatcccactgaagtgagacactcggccgtgagttcgtgtgccctgctctttcagggtctgatcaccctaggtgaactcatacaggttacgacctgcacagctcaattccacacctatgatcctgcaagccttacctggatcttagctataaaaagcctctttcatggggacttccccatcaagccttctctcctgtaacctccaaacaatctctgtttccaatgaattaaaaaaaaaaaaaaaggttaagaccaccaccactttaccaaatacttaaatttggggcaaaaaaaataaaaataaataaatcaggagtggtataataaattagatatagaaggctgaagattggccctgtaacctgatcacccacttgcaactctgaaatcagcatcctttttcctacaaaaaaatctctgtatctcttccagcgtttttagcttcagtctaacatagggagtctttatttatttatttatttttttattttttgagatagagtttcgctctgtcgcccaggctgtactgcagtagtgcgatcttggttcactgcagcctccacttcccaggcaagcgattctctgcctcagcctccagagtagctgggattacaggtgtgctccacgacgcctggttaatttttgtatttttagtagagacacggttttgccatgttggccaggctggtcttgaactcctggcctcaagtgatcccccctccttggcctcccaaactgctgggattacaggcatgagccaccgtgcccggctgcatcaggggtctttaaccactgtgttcaaagtcacatcatctatgactcttcctggtccctgcatcaagtcctaaatattctccctctgcttcatctcaagactctatcccttctctctatgtcctaaatattctccctctgcttcatctcaagactctatcccttctctctatgtcctaaatattctccctctgcttcatctcaagactctatcccttctctctactccttgttcaggccctcactgctctgcactggagctgactggtctctttattcccaggatctcccgtcactccccatcccacagcctgtgtttctctagacaaactgaaccactgatttttccctaaacaaagccatcaatggcagggcacaccaggggtactcaggtcaaacctacacgagatcatctgcgagacagaaggcccatggttgattcgcctcaactgacttacacgagaccacctgtgagacagaatgcccatagttgatttgcctcaactgttgcccacgggctgcgaaaacgggtagagcatgaaatgggaggttgtagagtcagacagatctagggctgaaccccagctctaccactcaccaacgatgcatcctagaacaagtttctcagcctcactgagtctcagttttctcatctataagatgggtaatcgcaaagataataatgaacataaatcctagttcataaggttgtggtgagggctaaattagagtgctgacacaaaggaaccagcacactgctggcactgaaagagctcaacaaagatcacttctcccctcactcccacctcttcctcccttcagcacagcactgtccaggaaagcaagctgctttaaaataagacatctcataacttgggagtaaactgtcactgcaaaccccctcggttggaagaggaagcatactccagaacacagattagcatcataaggatatcaataaatgcaatcaactccagcaaaagcagcatcggatactctcgctgatcttcacgctttgagggcccctggtgctgctgggtgtggtgcacccttggggaaggacgagggcccctgggtgctgctgggtgtggtgcatccttggtgaaggacgagggcccctgggtgctgctgggtgtggtgcacccttggggaaggaccacagaaaatccaggtccctaggactatgctcagtgctcttcatacgtttaattctcacaacaaccctgtgaggcaaatgccattattcttattttacagttgaagaagctggaattctgagacaactgacagacaggacattattgagtctgaatctgaacccaggatccagcacttcccagcgcctcccatggaggaggagaaggtgaatgctggattctcggtcttcggggcaagcttctgagcacaacaccgggggacacaaatttgtcaggggagaactcaaccaaaaccacatacacagatcatgggcggggacatccctcctccctccatccctccctcctcccggctccaggaccattctcagcgtgcatcgagctacataccgtacatctcgatggagaaatgcatgataccaataccaagaaatgttagagaaaggaaaatccaaaatgactaggaaactattttcagaaaggagaaaaaaaaaagttgcagctgggcacagtggctcacacctgtaatcccagcactttgggaggccgaggcgggcggatcatgaggtcaagagattgagaccatcctggccaacatggtgaaaccctttctctactaaaaatacaaaaaattagccgggcgtggtggcaggcgcctgtaatcccagctacttgggcggctgaggcaggggaatcgcttgaacctgggaggcggaggttgcagtgagccaagatcgcaccactgcactccaaggctggcgacagagcaagactccatctcaaaaaaaaaaaaaaaaatacccaaaaaacaaaacaaaacaaaacaaaaaagttgcctatttaaaactagggctgcaaacacagggcagcagagatggtgagccaccactgaccagcagctccccttgaattgatctgaacgcattcatagggggcttgctttagagatgcagatgactctggttggcaggaggtgccattattagaaaaagctcattattagaatgcctagatgagaagctcacttcctcttttggtgcaaaaaggttaggaagaaaccagaactcaccatttgctctgatttttcagctttgtctttgatatctttgattttgccaaagagttgttggatagctttctgagcctcttcaagcgcctagagtaagggaaatacatgaaaaacaaaaagtggctagagacagctccagtcactaactgtaatcaatgctaggcacaaaagaaatttccatgaagctctcctgattcattgtacttatgccaacaatttttctggaccaaaatagtagagacctatagagtccagtggctgcgaacaggtaaacactcgggactcttaccaatgttcctcacaaagtttcaacttaaaactaaatgattcccctctacctcagtcattactgtacatgttattgataacagcaaataggacaagtagatctctgtgtgtgggtgtatgcaaagactcacacagagggacaggggtagctctaaattggggcaagggaaagctctggacttggaagttccagattgtgcattcaaaaaaacctgaaccgtgaatggggactccagaactgcaacaaatcttaaagactttcatagtaagccatttgaaaaccaatgaaatgcacttagaaaggaacactgggccggacacagtggctcacgcctgtaatcccagcactttgggaggccaaggcgggcagatcacgaggtcaggagatcaagaccatcctggctaacacggtgaaaccccatctctactaaaaatacaaaaaactagccaggcacagtggcacgcacctgtagtcccagctactcaggaagctgaggcagaagaattgcttgaacccgggaggcagagcttgcagtgagccgaaattgcgccactgcactccagcctgggtgacagagcgagactccaaaaggaaagaaaagaaaagaaagagaaagaatgaaagaagaagggagagaaagagagacaaagaaagagaaagaaagaaagaaagaaagagaaagaaagaaaaaaagaaagagaaagaaagaaaaaaagaaagaaagagaaagagaaagaaaggaaggaaggaaggaaggaaggaaggaaggaaggaacgaaggaaggaaggaaggaaggcaggcaggcaggcaggcaggcaggcaggcagaaagctaatggtggctcacacctgtaatcccagcacttcagaggctgaggcaggaggattgcttgagcccaggagttcaagactagcctggggaacatggcaagactcggtctctgcaaaaaaaaaagttagccaggcatggtggcgcacaccagtagtctcagctacttgggaggctgaggtgggaagattacttgagcctgggaggtcaaggctgcagtgaactgtgatcatgccactgcactccagcctggtgactgagcgagatcttgtctcaaaaaaacaagcaaaaagctaatggtgagcccagcatttccactgaaataaaaacctacaaggacagatgctacacaatgaaagtattacaacacagctgcagcttctgctaggaggggaagcaacatgagggcagttgtgacatgtggagaccagaaagttcctgtgagtgccagcaggccacagacgtgtacagaccaaatgcactggaccgtccgtgagtaaagactacccacagctaaagtacctgtgagtgccagcagcccacagacgtgtatcgaccacatgcactggaccatccgtgagtaaagactacctacagctaaagtacctgtgagtgccagcagcccacagacgtgtatagaccacaggcactggaccgtccgtgagtaaagactacctacagctaaagtgtctgtgagcgtgtcagcaggccacggatgtgtatagaccacatgcactggactgtccgtgactaaagactatgaattcctgaggcagttatagttctaggcacgagtcagcatctccttaattcactccttcaatcactcaatgagtatttactgaatgcctcccatataccaggcatgattctaggcattgggaatccaatggtaaacaagacagtatggtctctctctctgtcctcaaggaatgaacttactttgagaagtaagggggaggagatcctggaaaaacaacaaaataaagaaacaagataattcctaagtgtggtgaattgacaggtgtggtgaaggacttatgcagtgatgagaataagggagatggtggtcacagaaggtctcctgagaaagggcacacaaatcgggacctgcaggatgaggaggtgtgagaatttgtagatttggagtaagatgattttttttttcttgagatggagtctcactctgttgcccaggctagagttaagtggcgtgatctcagctcactgcaacctctgcctcccaggttcaagcaattctcctgcctcagcctcccgagtagctgggactacaggcacctgccaccacacctggctaattttttgtatttttagtagagacggggtttcaccgtgttggccaggatggtctcgatctcctgacctcgtgatctgcccgcctcggcctcccaaagtgctgggattacagacgtgagccgccgcgcccagcctggagtaagaggattttcagcagagagaaaagcaaatgtgaagatcctgacagagaaaagacctcggtgttttggaggtccgaaaagacagacagtaggtggtagtgcaatattgcagcgggaagtgtctggaaataatctggagaggtgggcacgagccagagcacggaggcctcaaagcataaggattctgctctaagtgccaatgagaagccactgaagggtctaaacaagggacagatgtatggcttacttgtataagactgtcctggctgctgtgtggcaaaggggctgtgcaggggcaggagggaaagcgggagtgaaagctctgtgagaagttgctgcagtgtccacgagacggtggaggcctagaagaggcagccggtgctgacgggaagacgccgagcgattcagggtttccaggaaggtacaatgtgtaggactcactgatggactgtgtgtgggtgatgagggagagggagaaccaaggatgacgcccgggttttggttgaaaagccaaggccagggttcactgtctgaaccagggaatgcaggaggaggacgggcttgacaggcaggtgtgtgtggtggtggcggggctggaagtgaagagtcccatctgcaatacgttacgggtgcctgtgctatggctggaatgcatccccaaagttcatgtgttggaaacataatccccaatgcaatggtgttggcaggtggggcctttacgaggtgaccaggtcatgaggggtttgccctcacgaacaaatgaatggcattatctcgggagtgggttcttgataaaaggatctgttcagccactttctcgtgcatgcacacactttcttgccttccaactctgccatgggacgacgcagtgagaaggccctcgccgcaggacgacatggtgagaaggcgctcgccgcgggacgacgcagtgagaaagccctcgccgcgggaagatgcggtaagaagcccttgcctgatgtgggccccttgaccttggacttcccagcctccagaattataagaaatctcttttctttataaatgattcagtctgtactattctgttacagtaacataaaacagactaagaaaactggtatcaagaagtgggctactgctatagtaaatacctgaaaacatggctttggagctgggtgatggacagatgtggaacagtcttgaagtgaaggctggaaaaagcctgtattgctgtgaacagagtgctaagggggattctgctaagggctcagaagaaaagcagaaatgtagagaaagtctggaacttcttagaaattacttcatggttgtgaccggagtgttggtagaaatacagacagtaagctgggcatggtggctcacgcctgtcatcccagtactttgggagcctgaggcgggcggatcgcctgaggtcaagagttcaagacagcctggccaacatggtgaaaccccgtctctactaaaaatacaaaaattagatgggcgtggtggcgggcacctgtcatcccagctactcgggaggctgaggcaggagaatcacttaaacccaggaggcggaggttgcagtgagctgagatagcaccactgcactccaacctgggtaataagagcaaaactctgtcccgaccaaaaaaaaagatagcttacttgagatcaagtagagacattaagttggacataagattctggagcttggaagagaggtgataggttgggatttaaattcagaagtcattactttagagatgatatgtaagtctgtaagattagaagtcacctaggaagacagaatacacaagagaagaaaagatggcacagggctgacccttgggcatgccaatattcagaagtctaaaataaaaaaaagcagagatgcagagaaaaaccaccagtgacatgagaaaaaatcagggacgatgggtgttacagaagccaaacagaagtgtttgaaggagaaggaaagagtgattgtgccttctgttgttaaacactcatgtaagaggctgggcgcagtggctcaggcctataatcccagcactttgggaggccagggcgggtggatgacctgaggtcaggagttcaagaccagcctgaccaatatgatgaaaccctgtctctactcaaaatacaaaaattagccgggcgtggtggcaggcgcctgtaatcccagctactcaggaggctgagacaggataatcgcgtgaacccaggaggcagaggttgcagtgagccaagatcgtgccactgcactccagcctgggcaacaagagcaaaactccatctcaaaacaacaacaacaacaaaaaactcatgtggatcatgaggtcaagagtttgtgaccagcctgaccaacatggtgaaacccctgtctctactaaaaatacaaaaattagccaggcatggtggtgtgcacctgtaatcccagctactcaggaggctgaggtaggagaattgcttgaacccaggaaacggaagctgcagtgagccaagatggtgccattgcactccagcctaggcgacagagcaagactccatctcaaaaaaaaaaatgaagacagctgctactgattttgacaacagggaagttgttggtgaccttgacaagagcagtctcaatgcagtcaagggaatggacagcgatgacatgaagtagaggctgtgatcacagagcaggccacaaatgatggcctgtgggctgaagccagtctgccacgtctgccacctgtttttgtaaacaatgtgtttttggaccgaaactcattaataatacttaaaccaaactcatttgtttaagtattgtttatggggacttttgccacacaatggcagagataaatagttacaacagagaccatatggtcagtaaaggctaaaatatttactatccagcccttaacagaaagcttgctgaccctggtatagactttttttttcaagaagtttttgctatgagaaaggaagaaaaatagggcaaaagatggcgtaaagggagtaatttttaaagatgagaaatgcttgcatacgtctgcttgggagtgatttagcaggagagaaatttatttgggggggcaatgggttaattacagaagaggactgttttaaacataatgttctggggggggcaatgggttaattacagaagaggactgttttaaacataatgttctggggggggcaatgggttaattacagaagaggactgttttaaacataatgttctgcggagggggcaatgggttaattacagaagaggactgttttaaacataatgttctgggggggggggcaatgggttaattacagaagaggacttttttaaacataatgttcttgaattgtttagtgcaggggaccccaagccctgggccgtgggccagcaccagtccgtggcctgttgggaactgggccgcacagcaggaggtgagcggtgggcaagtgagtgagcatgatcttctgagctccccctcctcagatcagcagcggtattagattctcataggagcgcgaaccctactgtgaactgcacacgcgagggatctaggttgcaagctccttaacagaatctaactaaggcctgattatctgaggtggaacagtttcatcctgaaaccatgtccccctccctggtccatggaaaaactgtcttccaaaaaactgctcgctggtgccaaaaaggttggggaccactggtttagtgtatgagtattagccctttagcagggttataagtatcctttagaatggggaccaaggatatgaacagcactcctatagagcccatagctgagccaatcatccatttggtttaccggggacacgctgcgtttatgattcagtatagttattaacagctccctctccttctcaaagtgactctggtgataaatcatatggtcacctcacctacagcacctaagcaaggctatggcacagtgggaccttgacaaatattgcccactgattaaaagtatcatggtgcacctgtaagagtgctggtgctgaggctaccgctctgaataagtgcgctcataaccattcctctaacttcaggcccaaccatgagcagtggttcaaaatcacagcttcatgctttctgtaagtattctctatttggcttaaacagagtctaatatccaagatgctacatgggatcagtaaattctaaaaaagtttcaatcgtggagtaaaaagtgcaacagaggcctctgtaggcaactgaccactagaaaggactgatctttttcgacacagctcacatggaattctgtgatactgcaggtcatgtcatgttatggtgacatgctaatgggaccatagctactgtgttctagacaaacaccctaaaacatatgacatgcagctaagaaaggcaaaaaaggggctaagttatacacttaggtctcacatatgaagaagtctgcatgatcctatctcagagaaagggtttctatccctttctctcttacattaaacctggcatcctaccagaactgtctctgctgaaggtatcgcttttttcttccagcaaacaaataagactcacacaatcttacatgtcacagtctccaagatagataaactatgtgccagacttttttcgggctggaatacttttgcttgttttaataaggtactgaagttggggaaatgtactataattcattttgcagagtttaaaaactcctctgaagcactggtgctatcaggcaagtccattctcaacacacaccctaatatttgacatctaacctctgatcatgagtcatatagaaagattgttttgcaactggaagaatcatgggtcctacaagaagttaaggtttttttaagaaacacaaaaataccttcactacctggctaatcagaaatgtgctgaaagaatcactctggcactgtccctagacactttttaaaataaaaacgtggttggccgggggggcagtagctcacacctataatcccagcacgctgcaaggctgacggtggattacttgaggccaggagttcaagaccagtctgaccaacatgacgaaactccgtctctactaaaaatactaaaaaaattagctgtgtgtgctagtacatgcctatagttccagctactccggaggctgaggcatgagaatcacttgagcccaggaggcggaggctgcagtgagccaagattgcgccactgcactccagcctgggtgacagagacatactctgtcttaaaaaaaaaaaaaaaattaggccaggtgcgatggctcatgcctgtaatcccagcactttgggaggctgaggcaggtggatcatgaggtcaagagatcaagaccatcctgcccaacatggtgaaaccccatctctactaaaaatacaaaaattagctgggtgtggtggcgcatgcctgtaatcccagctactcgggaggctgaggcaggagaatcacttgaaccagggagtcggaggttgcagtgagctgagatggtgccatcgcactccagcctggtgacagagcgagactccatctaaaaaaaaaaaaagaagaaaaaaaagtaataataaaaaaattaaaaggtggctactttccattccaagctgtatgtggattaaaaacagaactaatcactcccaaaaatgtctgcatttaatctaccccactagagtttctgaacggagcactggagctacagcttacgtctaaaggtgttataaagcagtgactgttgtggccctttttaggactcaaattctatacacacacagcctgcatcctaaagtgttataaagcggcgactgtgtttaatctgcccctactggagtttctgaactgggcactggtgaactgggcactggtgaactgggcactggtgaactgggcactggagccacagcctgtatctgacggtgttataaagcggtgactgccgtgctcctcttttaagactcaaattctgtaaacaggagatgaaaagcaacccactgaattagcctagaaggctcagcaaaaccaattccagcatctttgtatttctgtgcatcctaatggtaaccactactctgaattctccttgcctcctggaggagacggtgagcaggctctcaaagccacaggaggtcacgtgtggaagataaggagtatggaacctggcacagactctcctgctttcttctttctctttttcctttttttgcagaactgttgtctgccacgttagtagacagaggggctctgattcattggcagtgccttaagaaatgagcatccctctggctctcaggtccatctaattttgcagtctgcgccatcagagaatgatgctgcctttatcctgtgagtccgcaggcagcctttcagagattttaaaccgagatcccctttgtggccactgcaggaaggaggaaaggttgttcattttccgaagagctggtatggctttagactattctgtgaaaaaataaggtgctattattcacggttactggggagaaaattagatttttccactattttgctaccatttctgttttccaacttgacatctatctgctggttcccttttctattatatggaaaagcaacgtgctgggccaggtgcagtggctcacgcctgtaatcccagcactttcggaggccgaggcaggcaaatcacctaaggtcaggagttagagaccagcctagccaacatggtgaaaccccgtctcttctaaaaatacaaaaactagccagccatcatggtacacacctgtaatcccagctactggggaggatgaggcaggagaatcgcctgcacctaggaggtggaggttgcagtgagccaagattatgccactgcactccagcctgggcaacagagtgagacggagaaagaaaagaaaagaaagaagaaaggaaaaggaaaagggaagggaagggacaaaaagaaggaaggaagggagggaggaaggaaaaagaaaaaaagaaaagagagacaggaaagaaagaggaaagaaagaaagaaaagaaagaaaagagaaagagggagggagggagggagcaacatgctgtatgagttacaagcaagggattttcaactagcagactgggattcaaaccttggctctgccagttactgtgtgatttctgtcaagcctcttatcctctaggaagtagtttcataatttccagaatgcaaattctatcagctacctgaaaggtagtaaggaatgtgagagtagaaaatatgtttggaatcgtttacccaacactcttcccctccgcatgcgaaatcttcctttcaccgtgtttctacagagtctgctgtccaagagctgaccaggccctcgttggagcagttttcccatgactttttttttttttttttgagacagagtcacgcttcgtcgtggcatgatctcagctcactgcaacatccgcctcctgggttcaagtgattctcatgcctcagcctcctgagtagctgggattacaggcacccgccaccacacccagctaatttttgtatttttagtagagacggggtttcaccatgttggccaggacggtctccatctcctgacctcatgacccgcttacctcggcctcccaacatgctgggattacaggcgtgagccaccagaatgagaattgggaaaaagagtttgtctttcgcgggtggtaggagtcccaagaagtgaaactgagttagagagcagctaggttccccaggaagggcaggaggctggactacaggtagagatgatgagggtgacacacacacacacacacacacacacacacacacacacacacaatctctctctcacacaatctcaatctctctctctctctctctctctctctctctctctctgagctttactcccgtctttggcttcagctgtttgacaagcccagctgagacgctatccttctggcggtcacacttgttgaacttcttcaaacgagacacaacaggatccttccaaataatcccccttttgcctaagcccgtttgaattgggatttttgtcttctgcaaccaagagagtcttgaatgagtttataaagcactcagctcacagaaagtgctcacttaatggcaactattagtattcccacatctcctagatggagtaggatatttcagatgagactaccctctaagaatcagaggttgttactcatcttttagagctttgtaaataagatggctaagttcagtatctgcaggcagactcagaagaacggctcatggattaagaggatggaatctttgaaccatgctgaaaatgagacattctccagaaaaaaattgaagtcttttgttcattcattcaattaaaaagtgagtgcctattacatgtactgtgctagatactgagagaaaaagatcactagctagggaatgtatctttaaagggcttgtaaggaatacatgtctgaattatacacaaaatgatacaaagagcgatgaataaagaatggcagcggccgggcgcagtggctcacgcctgtaatcccagcactgtgggaggctgaggaaggtggatcacgaggtcaggagatcgagaccatcctggcgaacacggtgaaaccccgtctctactaaaaatacaaaaaattaaccgggcgtggtggcgggcgcctgtagtcccagctactcgggagacttaggcaggagaatggcgtgaacccaggaggtggagcttgcagtgagccgagattgtgccactgcactccagcctggggcacagagcaagattccgtcgcaaaaaaaaaacaaaaacaaaaacaaaaaaaaaacaacggcagcatcatttcgaaagccaggaggtcctccagagagcagaaacatggatgagtgctaccacatctgataagccctacacggaagccctcaccacatccactgagggtggacaccaagggtcaagtcgcctctctttagagaaagtctcttcttttgttactgctgaccaccccggcatcactgagagctgttgctatggaaacgaggtatccccagctgaaacagaggtgcttcagccagcctcagcaatgctaacaatgcagcccgctctccacgacggtgctcaacagcagcagaggctgcgggactctcacacacccagcctcagcaatgccaacaacgcagcccactccccatgatggtgctcaacagcagcagaggctgtcggactctcacagccacagatggctgcacgtctacagctctttgcttccctacgtgtccgagaactcaaccaggactgccctggtcaaatgccagatggcgcccatcagatgagaatcactgatgtttacacaaattcctccacaccacttaggaacctggagtataagaaggctttatttaaagcacagatttctttccaagtttgtgaaccaaaaaccaaaggactgtaaagagcaaacggagtaattctcaccttgtttgttaaaatgttctgttccatgtaagttacttttatttatgatttctgcaaaccaaagccactgaaaatgtgaaccaaagagctcatttttgttgttttcaggagacaagccagaaattaaaatcacaagacgaggctcggaaacaaattcagcagtgcccaaataagactaaacatttacattgcaaagttctgcctatatctgttatcacccctaacttaaaacaagctagccctgaaatagctgcgagtgacggatgcgttcatgcagcttcctttgacgaaaggtaaccccggaggatgagagcatttcaagcaacacctccaagtggcaaaagacaaggaaacgtttaagcaaaagtttctgctgcttttgctgaatgaaaggtaaagaaattcaatatttttggaaatggggcacattaaaaggaacaacttgtccaagtttaacaaaggactacttttcccaaatagccaggacttccagttgccaagttcgaggttattgacttcattctaattccccatatcttactattacttctcattttagtcacttcataactctcatctatatcgtaagtcttcattcaggagaaaacatccttttgcgtgacatctggatgttccctcagctgactttttgagacaccttctgtgccaaatgcccttcaggctgcgaggattcatctgtgtgatttttttctcttcctggttcgcttactctctttagggcctcactggtgtctgtattttcggcagcacaggtgtgcagaacacagagagttctcttcaacctggggttcttctctcagtccagtttcttcgtcatactgagggggaccaagctggctaatgaggccatggtcactgccattatttgaaattccttatgaatcagccttccaggctccacagcaaaacaggtggctcccaaatctgcttttaaatgtttgtcactgtttaaagataatttagtatggacaagtatgcagcatactgcgaatgagaaaatctgggtctgtgattaactcgcttcgtgtgattttgggcacgtcacagaactgatgcgggccatctcttcatctgtaaaatggggagaacagcatctacgtggcctaattcacacatctttgtaaacatgtgaatcgagtaaatcaagtaaagtaatatatgcaacaatattttgcaaggtaaacatttatagtgtaataaaacattagcattacagatcaagacaaatgactcaaaatgttatgttctgcaaaagcaactgaaaatgtgtctttgcttacagtgaatgaatcaagaacagatcagccttaaaacagtacatccttaattacagagatctggaaaattccagggctgacaaacggtcctagaacctgcccacaagacactagttaccagaaatctctaaagactagaatctctaagtcttcaatgaaaaaaaagtttaaatttctgacttattagaagtagcactttgcctagctgataattctacggttatcacggaagtaggagagggctgtctgtcgcgaccgttcccttgtgactaggaacaagaaaagctcaagtacaacaaggagacaggagttaagaattcggtctgagatggggtaaagacccctcaaatacaccttttctcctgctttaaagacagaatttgaatcatcaaacttacttggggccaggtgcagtggctcacgcctgtaatcacaacactttgggaggcagaggcgggcggatcacctcaggttgggtgttcgagaccagcctggccaacctggtgaaaacccgtctctaccgaaaatacaaaaattagccgggtgtggtggcaggcacctgtaatctcagctactcaggaggctgaggcaggagaatcacttgaacccaggaggcggaggttgcagtgagctgagatcacacctccatcctgggcgacagggcgagactcccatctcaaaaaaaaaaaaaaaaaaaaaacttacttggtagtaagtatatctccagaagaaatgcccccctccaaattgggggtcattatgaaagtggcactaatacatttttgcctaacatccatattccaggtatcacatacaatacctagaaacgaacacagcatctgttcagagtctacgatgcaatacagaaacagaaattagaaaccccggcatgggatccaataatatacggaggacgacaagtttctgatgtattttagagctttaatctagatgactacaaaacgccaagccaaaacagatgtattatctttggttttgcaaaactaatctccttccagaggagaccctggagtccaaattggagcaaaggaaattttatagttacagactcttgaaaatggagacttacacatggaaatggtgacggcacaaccacaacgctgaatctgtgctcttctaaatactgtttccgtggatgaaagagggaagaggaaaaaggaggccaagttcttccatgaagacagaaagccaaattcccatccattgtacaaacatatctcagtgacttcttgtatcaaggacctgaaatccagaaggctttgctctgttggcagtaattccgcaatttttctaatgcacagcctcaaactgaggatggaattttccttacacgatttctaactactagcaatcaaaagcaagagtgacctgggtactagccagagcagttacagtggtgatgaatggcattttcctcttgagacgcagagtctagtttaaacttgtgactgcctctaacatggaaataagcagatggtgagttacgcttgaccttctttcttggctcctgaagactgccagtttatatggagatggctcagaagaacctgccaatttatatggagatggctcagaagaacaataaacttcagtgttctttcttggcgcagtattttcctaaaactattttcaataatcatgttgcagaaaagcgggacttggcgtttctaaggtcaggaaggaaacagtccaactgctggactagttaactaaataaaagaaaaaatcagggtggttttttttttttgtgggagagaacatctccatgagtaggcactacatacaaaagcttaagattcttgctaatcagaaacatgttgtctatattaattaaatgaagacaaaacagaacgcttgtgttaatgcacctgagtctatggaaagaatgaatctatgaaagttcagaacaatatggaaaaatgtttctaaagagattaaatattgcaatgattaaaaattaccatgtgacccagcaattccactcctaggtacacagcataagggacggaagcagaaactcaaacaggtatttgtatgccaatattcatagcatcactgttcacaaaagccaaatggtggaaacaatccaagtgtccatggacagatgaatggatacacacaatgtggtggaactacaccacggaatattattcacccgtaaaagagaagaaagtgctgatacatgctacaacgtggatgaatcctgaagaccacagaagtgaaatacaccagatacaaagggtcaaatattgtagaattccacttatattaatataaagttcccagaataggcaaattcatagagacagaaagtaaaatagaggttacaagaagttgaggaaagtgggcaggggaaggaaggacttaatggttttaatgtttacagagtttctatttggggtgatgaataaatttcagaaatagtggtagtggtggttgtacattatgaatgtaattaataccactaattatacacttaaaaatgttaaaataataaattctatattatatacatattttacaaggtttaaaaaataatgtaatatcaaaaaccactgaacagtatactttaaatagatgaattatatgtgaattatagctcactaatgctgttaaaatatagccatataaaaaattgaaaaaggttatatttactaaaatgaaatttaataaaatttttaaaagcatcatcaattacaccaagctacttgccaagaaaaaaaaccaggccaggtgtggtggctcacacctgtaatcccaacatttaaaaggctgaggcaggaggtcgcttgaacccatgagttcaagaccagtctgggcaacacagcaaaacccggattccacgagaaatacaaaaaaaattagccaggcgtggtggcgagtgcctgtagtcccagctactcaggaggctgaggtgggaggattacttgagcctgggaggtcgaggctgcagtgagccatgattttatcactgcactgaagccgaggtgacacagccagaccctgtctcaagagagaaaaaaagccaggcccggtggctcacgcctgaagtcccagcactttgagaggtcaaatgaggcaggcggactgcctgaggtcaggagtttcagactagcctggccaacatagcaaaaccctatctctactaaaaatacaaaaaaattagctggacatggtggcgggcacctgtagtcccagcttcttgggaggctgaggcaggagaatcgcttgaacccgggaggtggagactgcagtgagccaagatcaagccactgcactccagactgggtgacagagtgagactctgtctcaaaataacaaaaacaaaaaacccataaaaataaaaacaataaaaattcttttttattttttttgatacagagtctcgctctgtcgcctaggctggagtgcagtggcacgatctcggctcactacaacctctgcctcctgggctccagcgattctcctgtctcagcttcccgggtagctgggattacaggcatgtgccaccactcctggctaaatatatatatatatatatttttttgagacagagtctcgctctgtcgcccaggtagagtgcagtggcatgatctcggctcactgcaagctccaccccccgggttcacgccattctcctgcctcagcctcccaagtagctgggactacaggcgcccgccatcacgcctggctaatttttttgtatttttagtagagacggggtttcaccgtgttagccaggatggtctcgatctcctgacctcgtgatctgcccgcctcggcctcccaaagtgccgggatgacaggcgtgagccaccgcgcccccgccattaaaaattcatttttaacactcaggagatgtggccaaagtggcattcagagaaaagccgtacctttaagcgctcttcttacataacaagaagtagaaggagcataaagacaacagagatgaaagcagtaaaatataaaggtacagagtaatgaactgaaacaggaaaagaggagaactgacaaatatatccaagtgcaagtcctctgagaaggcctaaagaaattctggctgttttaatctaggattgggggtgtgggaaagagaaaacataaaattaagaatgaaaagagaggccagatgcggtggctcacacctgtcatcccagcacattgggaggccgaggcgcgcagatcacgaggtcaggagattgagaccatcctggccaacacggtgaaaccccatctctactaaaaatacaaaaattagccaggcgtggtggcggccacctgtagtcccagctacttgggaggctgaggcgggagaatcgcttgaacccaggaggcggagcttgcagtgagccgagattgcgccactgcactccagcctgagcaacagagcaagactccgtctcaaaaaaccaaaacaaaacaaaaagaatggaaagagaatataaacagagaattggaaaggatgaataaacttaaacatctgagtaaaattattttcaagaacaaggacttactaaaatcaactcaagaagtggaagatgtaactataaccacagaaataacagaaaaggctgccaagaaaccaatctcccaaaaggcacttgaccttgataatgggtcaattgtttcaaagacttcagggacttcagggtatattatctatagtctgactctctgaaacagtttactatttaaatggtctctgcggttgcaaaaaatgggaagcatcccagtttgttttataaagctgacaaaggtcaggcatggtggctcacacctgtaatcccagcactttgggaggccgaggcaggtggatcacctgaggtcaggagttcgagaccagcctggccaacatggtgaaaccccgtctctactaaaaatacaaaaatttagctgggcatggctgggcgcggtggctcacgcctgtaatcccagcactttgggaggccgaagtgggtgaatcatttcaggtcaggagttcaagaccaatctggccaacatggtgaaaccccatctctactacaaatacaaaaattagccggtcatggtagcaggcgtctgttatcccagctactcgggaggctgaggcaggagaatcgcttgaacccaggaggcagaggttgcagtgagtcaagatcgcactactgcactccagcctgggtgacaaagcgagattccgtctcaaaataacaacaacaaaaactgacataaacccgatacaaaatctaacaatgataaccaaaaagaagaaaatgtcaaactaatttcattttttaacatgaatcaaaatcccagataaaaatactaggattcaacaatatatttaaaagacaatacacgatgacccagcaagcatttatgaaaggttaaatattttaaaaagaaggaaaaaaaaacttaaacaaatcaacaacatgaaaaaacccctatgactatattcagtacatgctgagagggcatatgataaaatccaacgtctattttctggcaaaagtgcttagtgaccaagattgtgaagatctctccttaacagtcaaaagaatcgggaaacaagacaacattacacttggtgtcagctccgggagagaagtgtcttttgcttttttcattgtgtaattctcaatgcttaaaatagtgccaaccacacagaaggcactcactaaatatgtactgagtgagcaaatgaacagatacactatgtaaagtgcctgtcattaaaatcaagaacaaactgcctgccattcccactcttagctgatcctaaagagcatttctaaaactttttgacctcagaatctctttatacccttggaaatttattgaaagggtttatgtaggttatatctactgacatataccaatgttggagattaaaactgaggagtttaaataaaaaatatgtatctgttaatccatttaaacatgacaatgataaatatattacatgttagcataaattacatgttttttgaaaaataactatattttccccccagacaaaacaaagttgtttttttgtttgtttgttttttgttttctgttttgagagggaatattgctctgttgcccaggctggagtgcagtggtgcaatttcggctcaccgcaacctcagcctcctgggttcaagttattcttctgcctcagcctcccgagtagctgggcctacaggtgcatgccaccacactcagctaacttttgtatttttagtagagacatggtttcaccatattggtcagggtggtctcgaactcctgacctcgtgatctgcctgcctcagcctccccaagtgctgggattccaggcgtgagccactgcgcccggcctacaaaacaaatttcttgagaagcgtggcactgctggggtgtctctgcaaaaatctttagtgtctgctctgataaacaccagctggactcccatacacgcttccatattgaatctgttgtgatctgttgttctggttgaaaatatgaagaaaatctggcttcacatagatatatgtagttagaaaaggaagaaatactttaatacccaactctttgtctatttaggctgctattaatataaccaaatactttaaactgggtaatttctaaacaacagaaattgttaacagtcctggaagctggaaagtccaagatggaggcaccaggagatctggtgcccagtgagggccctttcctcacagacggcatcttctatgtgtcctcacatggggaaaggggcaaatggccatccttcaaaagtcttttatgaggacactgatctcacagatgagggcagaccccttgtgactcagtcacctcccaaaggccctgcttttaaatcctgtcacaatagggattaagttccagcataggaatcgtgggagataccaacattcctgtgctgtgacatgctgttttggttgaaaatatgaagaaaatctggcttcacatagatatatgtaattagaaaaggaagaaatattttaatacccatttcttagtctattcagctgcaattcatagaacagaacactttaaacacagcagcccttttcaggtacttggtgataagccttttttaaactacactaaaactcaaaaagtggtagattcttgaggattagctgcagtgtgggatttgaaattgaattaatgaacttgccatactatatgctgcatgaaacccgctgatcagctgtgcttctgccgaggatgcagaaagcagaaagagtgctgctcttacactaacaaggaggaaaacggaaactgaaaaccacaacttttcttgaacctagcagagagctaaaggtaaccaagcatcctgaaatccaagaaggaaggtgctcccccaggaaagacaggacaggagaaccgtctccatgtagaagggcatgtaaggaagacgggggtgccacacaagcaggcgagagggctgaaggaaagtttttaacaagttactaaaggccaagtgtgggctggcgcaatggtagggaggcctggaaagtgtaagcacaggtgggtttgcacccactctcaggctcttttccaagaccttcactgggtgttcatgaggaaaaaatgggggcactctctcctcttctacacaaaatgcctggcattcaataaaaaattttaagacatatatacgccaaaaaagaaaaaaaagaagaaagggaagaaaggaaaagcacccattgttaagagacaaagcaaccaacagaacctgtctcaaagaggagccatttggtataaatattagataggctacagaggaggggattttaaaataacaatgaataatatgctaaagaatctggtagaaaaggtgttttacctgcacgaacagatgaagaattgcagcagagagcaggaaattataagagtcaaatggaaatgctagaaaaaaggacatggtgtcagagctgaagaattccttcaacagcctcatcacactcgacacagcaaaaaaaggattggtgaactttaaggtgggtcaatagaaagtacccaaactgaaacacaaagaggaaaaaagaaaagaaaatccaacacctgcaggacagtattaaatgttctaaaacacatgtaagtagaattctaggaggaagagagaacacaacagaaacatttgaagagataatggctgagaatttttttttaagtgaaaggcattaaaccactgatccaagaagtgctgagatcccaagaggaataagggttgacttctcagaaacaatgcaagctagaagacaaagactgacatttttaaagtactaaaaaaaaataaaacaacaaaactgccaacctagagtcctaaaccaagcaaaaatatttttaaaaaataaaagcaaaattaaaacttttcaagcaaagaaaagctgagagcatttcttgccagcagaccgtgttataagaaacactaaaggaagttcatgaggcagaacaaatatggtacagaaaaaactcagatctaaggagataaaaatgagatctatgtgaggtgacaaatgccttcatttgcttctctgcaggctattttactgtctttatgtatcctataacatgttatacaccttacatatacacaatacaatttacttcttcaaacataaaataaaatagctgggtgtggtggcacacgccaatagcctccggctactcaggaggctgaggcaggaagatcacttgagccaaggagtttgaggccagctcaggcaacatagcaagaccccatctctaaaaatataaaataaatgtagaaacttgaaaactgacaaacaataaaaatatttttaaaatttatttttaattactctaattagcaaaaatagcaacagtgatggtgttcataatacgtaaaaacaagatgtggggcagagtggaatgcagagaggatgtgaggaagaggtcagaagcctgctatgaaaagactctcacattacatgtgaagtgatacaatgtcatcactgtgacatcagtgacaatatgactgtgataaagatgcatattgtggacccaggacaaggaagtacaagaacaaacagaaaacaagcaagatgctagatttaaatccaactatatcatgggaacaaagcaaactattcactttcaccagttttattccatatcacactgtaggtcctagccagagtaataaggcaaaaaatattttattcataggtgagatgattatctactttttaaaaatcccaaaagcctacaaaaaaaaaattcctgaaactaataagtgagttcagcaaagctgcacaatataaggtcaataaataaaaatcaattacatttccacaactagcaagagacaactggaaatttaaattttaagagataccatttataatcataccaaaaaccacaaaatatttagtataaatctagcaaactatgagcaagatctatatactaaaaactaaaacacactgttgagagaaactaaagacctaaatatatgaagaaatattccatgttcatagattggaagatttaatattgtaaagatgtcaattctccttcaattgatctatagactcaacgcaatcccaatcaaagtcccagagatttcctttttttcttttcttaaatcaacaagttggccgggcgcggtggctcacacctgtaatcccagcattttgggaggccgaggcgagtgaatcaccgaggtcaggagttcgagaccagcctggccaacataattaaaccccgtccctactaaagaatacaaaaaattagccaggcatggtggctcacgcctgtaatcccagcgactcgagagattgaggcaggagaatcacttgaacctaggaggcggaggttgccgtgggccgagatcgcgccactgcactccagcctgggcaacaagagctagattctgtttccaaaaaaaggaaaaaaaaagactaataaaggaaaacagatcccaatacctgtaaaagtcctgatgatcttggcgtaaaaactgccttgctttagagatgcaatgagagacagagaaaacaaaaagacagatgtactcaacacaaacagctggagtggagaaagcgggcagctttgagtctgagagccaggaagggaagactgcagttccaagagcctgggtctggaaaccggtgttgaacaggcagcaaaggctccctgcagtgacccaggtgtcagttccttctgttcattacaatacggcatccaaaaatacttttcttctaaaataatataccaacggccctcaacttgggatggttcaacacagaattttcttactacacgatggtgcaaaggtgagaaacattctgtagaaaccatactttgggtacccatacaaccactctgtttttcactttctgtacagtattcaacagatcacatgagctattcaacactttagtataaaataggctcggtgttagatgatttgcctgactgtagcctaatgtaagtgttctgagcaaataaatttaaggcacggtaggctaagctatgatgttcagtaaattacatgtattaataaattttcaacttaggatattttcaacttacgatgggtttatcagaataagaacttattcttcattgcaagttaagaagcatgtgtatgattgagaaaaatctggaaacaggtgtggtggcttgcacctgtaattccagccactcaggaggctgaggcaggaagatcgcttgaggtaaggagtccaagaccagccagagcaataaaggaacaccccatcactacaaaaaaaaactttttaaattaaaaaattagccagacatggtgacatgcacttgtagtcctacctacttggaagtctgaggtgggaggatcgtttgaggccaggagtttgagacagtgagctatgcacgccacactccagcctggatgaccctggagcgagaccctgtctctaaaaaaaaaaacagagagagaagagaattggctggttgcagtggctcatgcctgtaattccagcactctgggaagcgtaggtgggaggatcacctgaagccaggagttctaaaccagcctgggcaacacagtgagattccatctctacaaaaagtgttttaaaacagtcaggcatagtggtgtgcacctgtagtcctagctacttgggaggctgaggtggaaggatcacgtgagcccaggagttcaaggctagagtgagctacgatcctgccattacattccagcctgaatgacagagtgagaccctgtctctaagaagaaaaaaaagaagaatttggaagttataaaaactagaaatgaaaaaaaatctatctgcagtctcaaatttcaaaaacaatacaaataataaattctgttgtcaagtggaatgtttattttaactatagggtgatattgcatgtcacgccaggcaaacatctaatggaggtcttgaagacaggacaagagaaatgaacctttgaccaccactgttgccacagcagatattctggaccataggtaagctgtgccgccatttttattcacagagaacagcacgctgaaggcagtaaggggcctgggataattcagaacaagtaaacctggagttgctttaaagcacagcagtggggctggagaggagctgatggagctgacggaaaagccacaggaactcgacaaatacctggatgcacggaactaggaaaactgaaattccagtggactgtgtatcagcagcactggtgttcctgccatttactaaacatgagtgagcccaacattgtgcaaaaaaggtgttttaaaatacatttattctaggccagatgtggtggctcatgcctgtaatcccagcactttaggaggctgaggcagaaggattgcttgaggccaggagtttgagactagcctgggcaacatagcgagacctcatctacacaatacttaaaaattacattagctgggcgcagtggctcacgcctgtaatcccagcactttgagaggccaaggtgggcagatcacctgagatcagaagttcaagaccagcctggccaacatggtgaaaccctgtctctaccaaaaatataaaaactagccaggcgtggtggtggtcgcctgtaatctcagctacttgggaggctgaggcagggagaatcacttgaacccaggagacggaggttgcagtgagcagagatcgtaacacggcactccagcctgggtgacacagcaagactccagctcaaaaaaaaaaagccaggtgcggtggctcatacctgtaatcccagcactttgggaggctgaggcacgcagatcatgaggtcagaagatcgagaccatcctggccaacatggggaaaccccatctccactaaaatacagaaaattagccgggcgtggtggcacatgcctgtagtcccagctactcaggaggctgaggcaggggaattgcttgaacccaggaggcagaagctgcagtgagccaagatcgcaccaatgcactccagcctggagagagagcaagactcagtctcaaaaaaaaaaaaaaaaagatgcgcatggtggcatgtgcctgtggtcccagctactcgggacgctgaagtgagaggatcacttgagcccacgaggttgagggcgcagcgagctgtgattgcaccactccactctagcctgggcaacaaagtaagaccctgtctcaaaaacaaataaataaataagtggataaataaaataaagtatattaattctaatcccccctaaccctgaggtacgtattattatctccatgtcacagatggaaagttaaatatcttgtccaaggtcacacagataacagcagagacaaaatttaaattcaaagctcaagtttttttcactttaccaagatgccatccaatgttacatcactgaagatatctaactacaccaatccttagagaattgaaataaaatgcccagtccttcactgtacatagaggagagaagatagctatttggattccttatagcttttctaaaaatgagggattttagaggatacgtggcaaagtgttccaaatatgccgcagacatgtctccctgccaaaaaagcgctatcaaggtgatatgatttggctgtgtccccacccaaatccctacatgtcataggagggacctggtgggaagtcactgaaccacggggtggtttctcccattctattcacgtgatagtaagttctcacaagatctgatggttttgtaagaggcttcccccttcgctcagctctcattcttcctctctcctgccaccttgtgaagaaggatgggtttgcttccctttccaccatgattgtaagtttcctgaggcatccccagccctgcagaaatgtgagtcaattaaacctctttcctttataaattaccccgtctaaggtatttcttcatagcagtgtgagaacggactaatacacaaggcttgtgtgcaataaacaggatgaagaatggtagtgaggccaaacccagttgcactacattgttaaacagttaacggacattttatgagtccccgcctcaactacaaccagtagcactctagaagcaggcaaaatgaacagtcgcccgccccgcctcaactacaaccagtagcactctagaagcaggcaaaatgaacagtcaccggattcaacttgacaaaggcaagccaaccttgacctctgcactagacgtaagaaatcctggttgggaaatgactgtgagcccgaatcaaaactctgcccctacaaaaggctgatctaacaacccgactccagggctgccccacagatcacggtgttcagggcactcccaggtcatgtccaaacctcagcaattcctgaagtttagtgttatttgcagacatgctgaaaagtacaacgcaaaaaataataacagaaaagaaacaaaaaatgtccagccaatcttggccactaatgggaaacttcgaggccatactctaaaagctcagtcgctttagctgtggtatgttttagtaggaagaagcaagtagcaattgccatttttttccaaactatttgtggtccctttaatactaataccaattactttcttcaatttttatcaatcaatgggcttcattttcctcccaagagaggatgagagaaaggatcaatttaaagtgagggaggataagaatataaagtctccttctagtgagctgacaatgacaaattcaaaatcccacataatgaagatcaatgccatgctgggaagtcagtcttggagagcagttatttttgttcttttcacttgagacagggtccccaggctgcagtgtagaggtgccatcatagactgctgtaacctcaaacccctgggctcacgcaatcctcctacctcaaactcctgagtagccaagactataggtttgtgccaccatgctggactaatttttttttttttttttttttttttttgagatggagtctcactctgtcaccaaggctggagtgcagtggcaccatctcagctcactgcaacctccacttcctaggttcaagtgattctccagcctcagcctcgtgagtagctgggactacaggcacgcaccactgcatctggctaatttttgtatttttagtaaagcccaggtttccccatgttggccaggctggtcttaaactcctgatctcaggcgatccgcccacctccgcctcccaaagtgttgggattacaggcgtaagctaccaagcccggcctattttcgttctaatgcttgaattgcataatatgctaattttgaggaagaaaagcaaggaacactttctccttggaaggcaatgtactttgctgctttagttcataatctttatgatatctctatgtaaaagtgaagaaggcaagtattaacagcctccttttttggtgaaaatcaagacatgggaagatgaagaaacagccccggacgacacacacagacaggtagaaatcctgttttttgggtctggcactttgcgctgaagtgaggaggaagaacaggaagcctctgacggcacgtcacacggctctgaatccactccattctgccttttcatctacaacttgaatgaagacacagaaggcatgtctggcaaatctgctaatgataaagtggggaggtcatcaaggctcccaaagatcttgatgggataaacaatcgagcagaactagtgggatgaaacgaaagctgagacacacacggtctgacaatttcaaagactctcttgcacaaacagaggtggagaaagtttaaatgaaagtcatatgaagaaagacctgggacagtactggcccacagatgtgttttgtttgccctttgcagtgtttgtgaaaaacactaagccaatagttaaaaattgtgagagttacatgaaaatccggatttccggctgctcttgaaaaactgatagatctggcaattccaggtctgcgttcagacgtgacaacagctgattagaattcacttgtgactatccccttaggacctggtggatgcatgtggacacacaccagcctgcttacgccgcttaggttactttcccagctctgcggacatctgtttgcgactcttgacctgggggtttcaggtgactgccaactcagtagaagccaaccatgtaatacggctgccaaaaatctcagcaaatccaaggtaatggaagaatagtgtctaaaataaaaaatctcagcaaatccaaggtaatggaagaacaatgtctacaatcaaaaatctcagcaaatccaaggtaatggaagaacagtgtctaaaatcggtggcccttaagttttgaagagtcacagactccttagaaaatctagaaaaatcaataagttttcctcccataaatatgtctagacatacaaaaatttacagttaatttcagggacttgacagacactctggacccccagtccctaagttaatgagctcggcccagaacaaagaggtcaactgtctcagtgtatatgttgacacagcatgtccactcctgggaaccacattttaagagggatgctgacaaacagctatcaagagcaaggatgataaagggtctggaaattgcattataaagatgaagaaactaagaatggttagcctagaaaagggaacacttaggaacataatatccattttcaatttcagaagctgtagtaaggaaaagggattaggcttacacccatccagctggcagaactaagatcaacaagaagttacaatgaagtctatttcactgtttcagttcagtctaagaaaggagtttctcacaactaaagctataaaactgaactagtctgtcctgtggaccaacaaagtagcaagctccccatcactgaaagtagccaagcttctgcaagataatgaaacgtcagagatgtaatacaaaggactcctgaactgggtggaagattgtactacaattacctaatccttcttccaaagcgaaggagtgagcaatacagcaccccctccttatcagcagttcactttctgaggttttagccacctgtagttgactgtggtccaaaaatattacatggaaaattccagaaacagacaattagtaaattttaaattatgcgccattctgagtagtgtgataaaatcttgcaccacccaattctgtcctgaccaggtcacgaatcattccttcacccagtatatccatgctgaatacagcacctattagtcacttagcagccatctcggctattacatacagctccaaatcacaagaggagtgatgctggcatactgtcataattgtgctattttatttttagttattgtggtgaatctcttactgtgcctaatttgcatgctaaagtttatcacaggtatgtatacataggaaaaaatacggcatatatagggtttgctactctctgggtttcaggcatccactgggggtcttggaatgtatcccccacaggtaagtggggacgacttgtaataattctcttctcctcccaaaccttactcttgttctgatcaaagaaatggctacattgcagccaggctccattgaagagacagaaactcggtggctgatcctctcctgtgagtctgagagcttactgacgaccggtcaacgttggccactcttgaaacttcccactgccggctttttcttcctctaacccgcccctctattcacctctctttcacctacgttcaagccatccattttaattcttgggaagctgcaaaaatttcatagcataccacatcatgtacttgttgaattgactcatccacaaagttttaaacgtgggcatttaattaaagcttttgactgatgatttcaacagataaaaatggggaggattccgtgccatataaactttataagagcatcatcgtctggttagaagaggtcacagactagaccagttcaagctggcccacatagaaggtggtcaaaaaacaaagactctgcaaacgtttagcagaatgttaaccaagcggctggtatttcagaaacttcaagaagctcaagaaatgacctaattatgccttcaatatttaaatcattccttacccccaaataatttttgagtcaaaaacattgcttttcaaaagcaacttttctgctaaaaatgtcatttaagacaccatgaatgtgaagtcaacactttccccttatttacagatatagaagcacacctagccgggtgcggtggctcacgcctgtcatcccagcactttgggaggccgaggcgggcggaccacaaggtcaggagtttgagaccagcctgaccaacatggtgaaaccctgtctctactaaaaatacaaaaatgagctgggcatggtggtgcgcacctgtaatcccagcactttgggaggccgaggcgggcggaccatgaagtcaggagtttgagaccagcctgaccaacatggtgaaatcccgtctctactaaaaatacaaaaattagccaggcgtggtggtgcatgcctgtaatcccagctactcaggaggctgaggcaggagagtcgcttgaacccaggaggcagaagttgcagtaagccgagatcacaccactgcactgcagcctggctgacagcgagactctgactcaaaaacaaaacaaaaaacaaagaagcaagaagcacatctaggctgggtatagcctagcagccatctcggctattacatacagctccaaatcacaagaggagtgatgctggcatactgtcataattgtgctattttattttcagttattgtggtgaatctcttactgtgcctaatttgcatgctaaaatttatcacaggtatgtatacataggaaaaaatatggcatatatagggtttgctactctctgggtttcaggcatccactgggggtcttggaatgtatcccccacaggtaagtggggacgacttgtaataataagtgtctcatgcctataatctcagcattttgggagcccaaggcaggaggatcacttcaggccaggagttcaagaccagcccgggcaacacagcaagaacccatctctaccaaaaataaaaaattaaaaattaaaaatagctgtgtgtggtggcacatgcctgtagtcctagctacttcggaggctaaggtgggaggatcacttggccccaggagttcaaggttaccgtgaaaaatgattgcactccagcctgagcaacaaggcaggaccctgtccctaacatgataataataaatacaaatttaaaagcggcacatcggttctggttaaacacaatcaagattaaatttataaaacgaaaacctccttttgtccatatgccactcccttctgagtgttcttcagaagcttaggaagcgagtgctgaaagcaaacttctcttctcttccagggaagaggggaacgtggggcctcttgacctacaaaactcagtattttggaacatccgtaattccaccaagtctgttgcagtcaaatagactccttttagcaaaccagccagccagggctggagagcaaggctttcatacctaggagttgacaaggacaggacccaagagctccttggaaaaaaaaaagcttgtacttcagtttgcattacaaagtgctggaaaagacagatggggccatgacaggaaaagcagttatttcttctgggcttcctttctgtctggattctaaggagacgaatacaaagttccatcacagattgaaatgctatctaaacattcttgaaaatgtggtcttgctctgtgaaatacgacctgctctgctgcggcaacctgtaacctattaatacgggatgggggagaacgccgacattcctgcagactgtcgaattctgggtctgactctgtaataccgctagtttgcaagagtccagaaccacaggttgaaacgtaaataactgaaagatacacatctattatgcacagcatgacccaacaaaaaatgccgatgaatcactcactattttcacattcttgaaattttaaacatctatgactcctgcactgtaagacttctagtgagccattccaaatgtaggctgaatcacactgaacaagcagtgttactattcccagtagcagcaagttgggactcttaatgcacaaagcaagttctaaatcacttttaaggaacacccacttgctgatcaaaatgatgtttttatgataaaatgtttttgtttatttataattaataaacaatcttagacagacaaaatattcaatacagttgcataaaatgttgtgggggttttgctgttgcttttggggatggggtctcgctctgtcatccgggctggagcgcggcggcaccattacagctcactgaagcttgtactaccacacccagctaattattttaccttttcgtagagacgtgtattgctatgttgccgaggctggtctcaaactcctggcctcaagtcatcctcccacctaggcatcccaaagtgttgagattacaggcatgagccattgtgcctggctcagttgaataaaatgttattgcatgtggcctatgtgtagtgaaatagaaagatgacaaagatacagttcttaccttccaggagcttacaaacatcaaagggatgagacttgttctctggtaagtcaagggagaccccaaaagccaaatgaaaagtacaagaatggggctgtgggatttatggagaaaggacatcgagggacactggaatccattttctcctctgtaaaatgaggggaggggcccagatgagtttcaaatcctttccagttcaaaattctgattccttggtgtattcagataaggtccatggaaaacatcgtcaagaaactagtatctgagctggtccttggatgggtaagattgggaaatgcggcggcttaaagaaataggaggaaaagcatttcaagcacaaaagagtctgtaagcacaggtccagaaagcacaggcatgctcgtagagcacaaagtcttcagtgtagacagaacacaagaggaggcaaaactggaattggagaccagaattttgaatgccaagcaaaggaatttggatttctttttttttttaaacagggtctcactctgtttcccaggctggagtgcagtggcgcgatgatggcttactgcagcctcgaacttcctggctcagctgatcttcctgtctcggcctcctcagtagctgggactacaggcacaggccaccaccatgcccagctaattttgtactttttgaagatgcagggttttgtcatgttgcccaggctggccttgaactcctaggctcaagtgatctccccgcctcggcctcccaaagtgttgggattgcaggtgtgggccaccatgcctggccttggatttcatttagtggccagagctgatacggtgtctgaagaggtagacaatacgatcaaacacagattaggacagctaagcagcagaatgcagctggagtgcttgaggctgccctgtccctctgtaggacccctctgaaggtcccatttacatgggcctcatctgccaaagaagccatgcttcatgaaatatacctcaacagacaaaacgaggtaacgagggctaaaaaaaatacaggagtccagaaaaccagaacagttttaggaacctaatgtgtctacacacaaattctgatgatgacaagaaggccagctactcacaaacaggccaaaggaaactggctatcaaatggaaagtgactataaagtggaaaaatggaaaaagaaagtgatataaagtagtaaaaatagacagatgggaaaactacagatgtaaaagaaagagactcctaatatctgtaagcaactggcagaaggaaacagaaatatcagagatctggaaatttcagcgtaggattatatgctcctcccactccaaatctgggcagcaggatgaacatttttagaaattagctgtcctaaaaaatgtcaaagaggagaaatcacagcattgaagcaattgcaaagaagcagtcctgacctgagttagtgctgataagggaggacaggacatggcaagagaggacggctagaaaggcaagctcagcatttctactacaacagccattctgaaatacgatgcctcaacagaagaacagaatcaaataaaaagggaaatggttcacagataacatctggcccctcaattattaaagagtatctcctccctacacacttttcccttcattgcctccaacagcctccttaactagatccagtaagacttacttcattccctccaatggcctccttaactagatccaataagacttataaaacttttttttttttttttttttgagacagtctcacccctgtcgtccatgctggagtgcagcggtgcaatctcgcctcactgcaacctctggctcctgggttcaagtgactctcatgcctcagcctcctgagtagctgggattacaggcgtgagccgctgtgcccgctgtgcccggccaacttgtaaaattttttaatgaatcttgagtcacctgcctgctggcaaagcgaggtacgaggaaatggtaactatgtcaggttactatcttttacagccacaaaatatcaaaaccccaacaactcagctgacgaatgcagcaacctcatttagccacagcccacaaaataaaagagggcacaagagatgcccgacacgaaggagaaagacaaggaagccccagtgttctcatctggcctcgggtgagcggtgccacagttcacggtcctggtccaagggacactgagggacagcacgtggctgctgtgggcgcctgccctgtcttgtcctgccatgtatgaaacggatcaatcggaaagtgctctgcaagagggcacatcgacgttttggtcatctggttgccgggagaaaccaggggagcataggtaatatggaggaatgagttacttacttgccgtccatcctgccccacgttcgtctgacctcttacaacagttcgaatattgtcatccagtctcctagcaaaacagttcaaggatacagtcattcaaataatctttattctaggttgaccaaaagaaaaaaagtaaaaagtaatttattcatcaacttctgcagactgcacctaattgtccagaaaaccaaacatgtgtgagtggcatcaggcaggaggagggcagcgacagccgtgcgggaagtcaagcccagtgcaggctgatgcatcgccttgttgttaaaaatgcctattttcacttaatagtcagagctatctgaaaggactaataaaatctgcaggatttttcatggagtacatcaggaatgacaaagttccggagcctttacgtgaacatgccagataactcaaattacctcacacacaatccctttctcggtccccttatgaggcggaaagagccagagtgatagatggaatcagtgcttccgggccctgatcatgcaatccatgcctgaggcagatctacggcttccagctcctctgcccccacggttcacaatgtttaatcatgggccaccacccaacccaccagcagatctgacatggttagctgttatgtgaccaagggatacacatataagcccatcttcatgtctaagccttgggaacacaaaaacaggtaaatccacaaaaacagggaaataaagccattaaaaagctagtcgaaggacagacagaatggctcacacctataatcctagcactttgggaggccaaggcaggcagatcacttgaggctaggagttcaagaccagcctggccaacacagtgtaaccctgtaactactaaaaacacaaaaattagctgggcatggtggtgcatgcctataattccagctacttgggtggctgaggctcaagaattgctcgaacctgggaggtggagattacagtaagccaagatcacaccactgcactctagcctgggtgacagagccagactccatctcaaaaaaaaaaaaaaaaaatctagtagatgtgggagactgaggcaggcagattgcttgagctcagcagtttgagaccagcctagccaacaaggcgaaaccccatctctacaaaaaatataaacattagcaaagtgtggtggtgcgcctgtagtcccagctactcaggaggctgaggtgggaggatcacttgagcccaggagttcgaggctgcagtgagctgtaactgcaccagtacgctccagcctgggacacagagtaagaccttgttttgaaaaaaaaacagaaaaaaagaaaaaaaaaatctatcagaaaagcttttgcctccttctataattacaaaagatgttttgagtagactctatcacagcttccttccttttgtatgaagaattgaagactggccaaagcattgagttccttgccacaaagttcatatggataaaataattatatggccgggtgcggtggctcacccctgtcatcccagcacgttgggaggcgaaggcaggtggatcacttgaggtcaggagttcgagaccagcctgaccaacatggtgaaaccccgtctctactaaaagtacaaaatttgccaggcgtggtggctcacacctgtaatcccagctactagggaggctaaggcaggagaatcacttgaacctgggaggtggaggttgcagtgagccaagatcacaccattgcactccagcctaggcaatgagcaaaaatccgtctcaaaaataaataaataaataataaaaattttaaaaggaattatattaccatctatggcaaacttgagatttcagtgctctcacagaaaaatgtgatccagaatgtgattaactaaattaacaatatacttttcattaattatgaacaatcacacagctttactcaccttattttcagcctaattttgttcacgacttcgtctatgttcgccagagactacaataaagaaggaagagtgcccagctgttagtccacttcctggaattcctctttcacaggaaaatgatgtgctataatagctacttatgaaatctcaaaaaatttaatcacatgatatgagttttgctttaaaaaaaaaaaaagtaaagcagtagttggaagctacagccacatctagcccagcccctgttttttgtaaataaagtttcactggaacacagccatgcccgttcacttacatattgcctgcggctgctcttaagctaacatggcaggtaggcagtcgtgaaagacgctgtacagccacaaagcctgaagtatttactatctggacctttacaggagagtctgctgacccatggtgtacgtgattgtgacaaattcacgtaacgaaatacagcaacaaaaatgaatgaatgcacaacaccatggataaacattttactaacggaatggggcacagaaaaagccagacacaaggggacagaggatatgatttcactaacataattctcctgttagaagctaggacagtggttatctctgggggaaggtagtgacagtgaacaggcaaggaaaggccttctgaagatttttttaaatgttttatttcttgatctgggtggcagttacatggctatgttcattttgtgaaacttcatcaagttgtacccttaagatttgtgtactcctctgtattatgttatacttcaataaatacacaaatttattttttattatatagatccactagaaaaaagtctggaaggatagataggagtaattgtaatgtattagtagttgcagcattagtagctataatctatcaactacgtattgcaatatgaaaagaagtgatttcaaatttttcttcttgggccgggtgcagtggctcacgcctgtaatcccagcactttgggaggccaaggcaggcggatcacctgaggtcaggagtttgagaccagccagaccgtcatggcgaaaccccatctctactaaaaatacaaaaaaaaaaaaattaggcaggcttggtggtgggcacctgttgtcccaactactcaagaggctgcggcaggagaatcgcttgaacccgggaggcagaggttgcagtgagctgagaatgtgccattgcactccagcctgggcaacaagagcaaaactctgtctcaaaaaaaaatattttcttctttttgtctgtattttataattattgactatgcactactactgtgattataataagcttattataacaacaattaaaacaaagggatcacttctgaccttagagatgagaaaatgtgaggaaatggtgccccctaatggacaagaggaggtacaattttatagtactattttaattcaagttttcaaaatacaatttaataaatcctcttcctctctcccttaacaaatattttatctcagaaggaattagggatattgtaggaaatatgcttataaattgcttctggctacctctgatgggaggaggaggccaggtgccttccaggagcaggtctggtaagagaaacaggccatgagtgtttgagatgtcagactgggttgtcacagctcatcctactgttctgaccaagccaacagttactcagaattttcagaaatccaagaacagcttgaggtaaaaatgaatctcaggctggacgtgatggctcatgcctgtaatcccagcactttgggaggctaaggtgggaggatcacttaaatccaggaattcaagaccagcccagacaatacagtgagatcccatctctccaaaaaataaaaaaaagttagccaggcatggtggcatgtgcttgcagtcccaggtactcaggaggctgaggtgggaggatcacctgagcccagaaggtcgaggctgcagtaagtcatgtttgcaccactgcactccagcctgggctaaacagccctgtctcaaaaaaaaagaaaaacgaatctcagaaaaattactttaatttatatataattatatatatacatatatttttgtgtgtgatggagactagctctgtcaccaggctggagtgcaatggcgcgatctcggctcactgcaacctccgactccctggttcaagcgattctcctgcctcagcctcccgagtagctgggattacaggcacatgccaccacgcccagctaatttttgtatttttagtagagacggggtttcaccacgttggccaggatggtctcgatctcttgacctcgtgatctgcccgccttggcctcccaaagtgctaggattacaggtatgagccaccgcgcctggccaagaggaaaacatttctaatatcattttatgatagcaagtatttttataatatcaaatagcctacctttaagatggcggctcactctgtcaccaaggctggagtgcagtggtgcaatcatagctcactgtaacctcaaactcctgggctcaagcaatcctcccaccccagcctcctgagtggctaggaacaaaaaggtacatgcactgagcctggctaattttattattttgttataaacacagggtcttgctatgctgtccaagctgatcttgaattcctggcttcaagcaatgctcccgccttggcctcccaaagcactgggattacaggcatgaggcagtgcacccggccctataatatcatttttataatataatgaatgtagcttttaaaaagaacagaggccgggtgtggaggcttatgtctgtcctttgggaggctgaggtgggtggactgctagagcccaagagttagagaccaacctggacaacgtggtgaaactccgtctctacaaaaaaatagaaaaattagccgggtatggtagcacacgcctgtagtacaatctgcttattaggctgaggaaagaagactgattgagtctgtaaattccagggcacagtgagctgtgatggagccactgaactgtagcctgggtgatgggtgacaatctcaaaaagaaaaaataaataaaaataaaataaaaataggctgggcgcggtggctcatgcctgtaatcccagcactttgaggccgaggtgggcggatcacaaggtcaggagttcgagaccagccaggccaatatggtgaaaccccgtctctactaaaaatacaaaaaaaaattagccgggcgtggtggcaggtgcctgtaatcccagctactcgggaggctgaggcaggagaactgcttgaacccaggaagcagaggttgcggtgagccgagatcgcgccactgcactccagcctggataacagaaggagactctgtctcaataaataaataaatagaagagaaagaaatatcctaaagttacactatttgatagtcaggtggcctttgggtgactgttttcccttcatttccaggctttctgctggaggggaaagggaaaggctgctagcatttaatgtggatctcctaggcaacaattgcaggcacttcacagaaattatttcccttaatcccctctgccaggcgaggcacacttttctcctcttcaacgttaagattgggaactatggaggcggaggccgggcatggtggctcatgcctgtaatcccaacactttgggaggccaaggtacgtgggtttcctaagctcagcagttcaagaccagtctctgggcaacctggcaaaaccctgtctctaccaaaaatacaaaaaactacctgggcttgctggtgcacacctgtggtcccagctactcaggaggctgaggtgggaggatcgcttgagcctgggaggcagaggttgcagcgagccgagatcacaccactgcattccaacctaggtgacagagtgggaacccacctcaaataaaaaacagatgggaaacgtgctctgcaggacaggtgctttgcctgaagctgcagagatcccacctcaaataaaaaacagatgggaaacgtgctctgcaggacaggtgctttgcctgaagctgcagagatcctctttcttactctagcatctacctctaacgcaatgattcttgacctaattttcctgcaccccaagacaccggacagctatgacacacccactctcatcagttagttcagtgtctggctatggcagtgatcctcaccagggtcgagggcctctcctggagttggggaaaagccctgtgggaatccacattggctgggcagaggggtttatcctgctttgagaatcactcatctcgtttagttataatgtggttgtacagttttgtttactttttaaatgttttagttattgcaaaatatttcctgattctaatggtaattcttgacaattacagaaaataggtagtcatctgcacacccaggacagtatgaccacaatcagaatttttgcgtattgccttctactacgaaactgtatagctgtacaaaaataaactgggatgataagcaatttggcatcttttttttttttttttaaggcaggatctcattctgtcacccaggctgcagtgcagtggcacgatctcagctgactgcaacttccacctcccaggctcaagcgatcctcctgcctcagtgatccacccgccttggtctcccaaagtgctgggattagagaatacagccatgagctggatcttgggtttttttttctcttaacaatacagatccagagcatttttggggtcaccagaaactctttagaaacatccccatataactcttttctcaaagttcctaattatgttagttttgtattagttttccataaatttcatttagtttcctctaatcaaactttcaaatgattatcttcagtttactattaggaggctaaaacgattttctagaccactgcgaccaaacctggctactatttaaaccccacaggcactctgctgcatggaaaatcccaagctcctctcaggcctggctgggtgaaatagtaagaggcatccattccaggccactcaacaggctccagacaaccgcagacacacaagtacttccactcaacagaaacatattctcaccctcctcctcacagtaacactaaattcactctggaaatactgaaatctactttaaacaatctaaactcataatgtacaagtgtttactggaggtccatgaggtatacagatggtttttgcccaatatctgacaatagttaaatttcaagctatgccactactttctactaccttttcattaagatccacaggaatctggcttagatttcactcagatgacctgctaagtgaaactctgagactagagaagtaaagataaccctgtgtcataaatgttctgagttactctaagaaacgtgactgtacattatcatatacctggggcataattagacaagacacagaactgaatctgtggaacaacaaagatcttgagttttcagtagtttaaaaaaaaatacagcacatacacacacaccacaagaggtgagaacctggtggtttcctacaaaattttcaaatctaacacttctttttgttttggtgaatcagcaattactatctttatcctagctattcccaaatgtctatctccagctaattcctaaaattcccctttcatacaaaatgatgagctataaaggcttttcgtgaaatctcaaaaaagacaatcacacagtatatcatcttttaaactttattttaaaaatcagtatatccattaaaaaaagtttggaaggatctgccaaaatattcacaatgatggggatcaagagctctgcactcaaatacccaacaacttatttccacctggatgacctgagtatgttcaaacttgggctcaccttacagcccactccagccctacctgccactgaaacctgctctttctccttacactcagtaattgggtaaagtggaaagctgccattacccatccagtcagccaaatctggctacctagaaaccagttcaaaattcttaacttagggccaggcacagtggctcaaatctgtaatcccagcactcggagaggctgaggcaggagggtggcttgaggccaggagttccagaccagcctgggcaacacagcaaggcccagtctgtaaaaaaaaaaaaaaaattaaaaatcagctggggctgggcgcggtggctcactcctgtaatcccagcactttgggaggctggggcagatggatcatgaggtcaggagatcgagaccatcctatcctggccaacatggtgaaaccccatctctactaaaaatacagaaattggctgggcgtggtggcgcgtgcctataatctcagctactcgggaggctaagacaggggaattgcttgaaccagggagtgggaggttgcagtgagccgagatggcaccaccccaccccaacctggtgacaaagcaagactccatctcaaaataataataatactcagctgggtgtggtggcacacacctgtagtgctagctactgaggaggctgaagtgggaggagtgcttgagtccaggaatttgaggttgcagtgagctatgattgtgccactgcactctagcccgggcaagagagtgagaccccatctcaaaaaaaaattattaacttggcctgtagtattcagctaaaacaccatttcctcaagggagtaagccttttcaatccatcttgagcaagtaaggccctgggttctgctgtcactgtatttggcatgcttccttcatggcaacgctatcacatttaagccgagtgttatctttccgtgcctcgtgattcttactctaaaataagaaggataacaaagtggagtttatcactgtttagtgcctagagtgctgtcgggtacacaggaagtatctaataaagattactattacagttgtagtaaaggttatataagagcaagtgacaaataatatttaaaaattatatgagcaagtcaggccaggcgtggtggctcacgcctgtaatcccagcactttgggaggtcaaggtgggcagatcacaaggtcaagagattgaaaccatcctggccaacatggtgaaaccccgtctctactaaaaatacaaaaattagccaggcttggtggcgcgtgtctgtaaactcagctactcaggaggctgaggcgggagaatcgcttgaacccaggagttggaggttgcagtgagccgggattgtgctactgcattccatcctggcaacagagtgagactcagtctcaaaaaaaaaaaaaaaaaattacacaagcaagtcattgtaacatcataatttacctataatctgttactgtgagattaactatcaagatagactatgaagtctgtgttggtagactatatctgtcttgctcacttctctaccccagatttcttataaagctaggtagagtgggtgtttttttaactgaataaacgaatgagtgaattttggattctccatgaccctctactttcatgccctcaggtaccaaactgcatgactttggtcccctcaatagctctcagatctggttctctctatcccacagcttttctccaggtctcaccatctctttccagtgatctactgcgtgagtctcctgcctgtagtctctccccacctccatcccttgctcgtcctccacatggctgccagacggaattttaaaaacgtgaatgtgctccagtcattatcctgccaaaagtccttcaatgaatactcactgcctacagcagcaacctccagagcagggtgcgaacgtccccacggggtctgccacactgccccctggggtgtgaggagcaaacactgaagcctctatgtttattttctatttatatagcaaatactactgaagcctaacatttaaaattggtactcacatatgtatataatattctggggatacaggcttaaaaattatccaagtgaaaatcagctctgtgggtcgggcgcggtggctcacgcctgtcatcccagcactttgggaggccgaggcgggcggatcacctgaggtcaggaatttgagaccagcctggccaacatggtgaaaccccatctctactaaaaatacaaaaattagccgcgtagtggcaggcccctgtaatcccagctgctcaggaggctgacacaggagaatcacttgaacccaggaggcagaggttgcagtgagccgagatcatgccattgcactccagcctgggggacaagaatgagactttgtctcaaaaaaaaaaaaaaaaaaagaaaatcagttctgtgaaaaatatttgggccaggtgcagtggctcatgcctgtaatcccaacattttgggaggctgaggcgggaggatcacattagctcaggagttcgagaccagcctgggcttcgtagtgagatctcgtctctactaaaaaaattttaaaacttagctgtgtgtggtggcatgcgcctgtagtcgcagctactcagaaggccgatgtagtgggagcgctagagttcgggagttcacagttactgtgattgtgccactgcactccaacctgggcaacagagtaaaactctctttcaaaaaaaaaaaaaaaaggaagaaagaaaaaaagcatttcactgaaaggcatgtggtctccaaaaaaactggcaacgataagcctagaggacagagatcctccaggatccttgctctccctcctcagcctcatctcctgtgagtctctgctcactgtgcacatcttatgtctcctgtttctgtgccttggtcctgtgtttagaagggccttctgtagggtccagccctacggggccttgtgggttttctcttcgtgtgcggagacgagagattgtagaaagacacgaaactaagaagtagtaggaaagacagctgggcccggggcaccactaccaccaatgcacagagtccaatagtggccccgaatgcctggacccactgctatttattgtatacaaggcaaggaggcagggtaaggagtgtgggtcatctcaaatgattgacaaggtcaagcaagtcacatgtccacgtgacagggggcccttccctttgtggtagccgaagcagagagggaggacagcagacgtcagcattttttctttgcacttatcagaaagatcaaagactttaacactttcactaattctgctactgctatcttctaagaacttaaaggaggagccaggtgtacaggtggaacatgaaagtggaccaggagcatgaccactgaagcacagcaccacagggagatgctgaagcctccggatgactgtgggcaggcctggggaatgtcaggccccccacgagagctggtggagcagagtgttctctaactcccccagggaaagggagactccctttcacagtccgctaagtaacgggtgccttcccaggcactggcactaccgcaagaccaaggtgccttcaagcagcccttatccaggcatgacagaggttctcactgttgtcttctggtctcctgactctgtatggcctggtttttccttggtcgtaataatgaaacaaagattaatactaaagactaatgattgataatatccatatacaatcatctctatatcctatttctattataactctacttatttaactattttctttattatattggaacaggttgtgccttcagtctcttgcctcggcacctgggtttctttccgcccacgccttccttccctcatcatcctggaagagatacctagctgctggctctgtctagaatactgttctgccagactgctgcaagcttgactccttcctgtccatcaggtctcagcttagagggaaccacctcacagagaacttcccgttaagcccctttatttaaaggaccctccgcagcacgctctgtcacggaacctgcctggtatcacggcgcatcacgctctgtcacggaacctgcctggtatcacggcgcagcacgctctgtcacggaacctgcctggtatcacggccaccatgtttgatcatctctagtgtatttgttggtttatttcttgtctttctccctacactagactccataagaccaagaccagatttgtcatgtttacatttctccctagtttctaaaaataatacctgacacttagcagacatttaataaacgactgctacgttttactaaatgaatacatgaatgaatccctcaagctcggcagacaggctacctcctctctgaagttgtgattttccttggaagaactggtctttgtttccttaccgcactgtcccactgtcactgacggcattcgccagggtctcccaccacttgatcctgcacacctcaagggcatggactggaccttatcatctctgcaccctcagcacctagcacagtgactgacaacacatgacaggcacctactgaacaactgctgactgaaaaaatggaaacgaagcgggactctcactgcccttctcccaactctgctacttccagttctggtctacttctcacccaaacacccaaaaaccaattttgtaagaaaatccatctccacaggaaaatcaccggacaaaaaataataaaacgtgaagtctaaaaatctgtatcttgaggccgggcgcagtggctcacgcctgtaatcccagcactttagggggccaaggcaggtggatcacgaggtcaggagtttgagaccagcctggccaacatgctgaaaccccgtctctactaaaatcacaaaaattagccaggcgtgatggtgggtacctatagtgccagctactcaggaggctgaggcagaagaatcgcctgaacccaggaggcagacgttgcagtgagccgagaccgcgccattgcactccagcctgaacgacaacagcaaaactccgtctcaaaaaaactaataaatagaaataaaaatttacatcttgaaatagaggtgaaagtggctttatgattctgggcttatcctgcctgcctcacccccacttgtccctactacattataaaaatcctttccactttcaatttacagcagaaaatttgggaggactctcacaacctaagagtacaattattaataatatgttcactatacaatgaattccattccaacacagtgtagctcactgccccagctggtgatgatggagtttgatttgaatttaactctcccttgtgtatcaagggcccgtagatgatctagtgtaacacacgaagcataacacccaagatgtgccaaaagctgctgaaaggaaggaaacctgaaactctacttacttgctcggttgggaacagggtattgatatactcaacagcattgaaatctgctcgatctagagggtcctggcttggaaacacctatatagaaagagaggagtatatataaaaacatgtagtataccgtaaatatatataattttaatttgtcaattaaaaggaaagggccgggcacggtggctcatgcctgtaatcacagcactttgggaggccaaagcagatggatcacctgaggtcaggtctctactaaaaataaaaacttggctgggtgtggtgttggcgcacacctgtaatcccaactactcaggaggctgaggcaggagaattgcttgaacccgggaggcggaggttacagtgagccgagatcacaccactacactccagtctgggcgaaagagcaagactctgtctcaaaattaaattaattaattaattaattaaaataaggctgcgcggatcgcttgagctcaggagttggagactggcctgggcaacatggtgaaaccacatctctacaaaaaaaaattagctgggtgccatggcacatgcctgtcatagtcccagctacgtgggaggctgagatgggaggatcaccagagcccaggaggttgaggttgcagtgagccgagattctatcactgaactccagcctgggcgacagagtgagatcctctctcaaaaacagtccacctctaagacatacagctaactccctaacaacctgaagaacacgcaacaaggtggatgatacaagcagccaaattatccactggacactgggtctcacccagcttgatagagttacaactgtgggaagcaacttcatctctgaagaagccttccaaagaaatatagagtcaaaaaatcaaaatatcttcaagacaactgttagaaaagctgaagccttctaccacatcaagaggaggtggatgagaagaaagtgaagatgttttctttttaaaatgttcagcattgctgtttccataatgcacatatacacaggttatttacacagtctcaatgatacgtgctcaccagagggaaagtataacccacagagagcaggatacaagagatacaaactatttcctcaagttgctctcagtttctgtattcctctcacgactcctaggttttagtgctgtcctaggttttaaattgttttcatgtaacaaggctcctaacaaaagccagctgaaaaaagaatgactggttccaatgatggaggaaaaaaactaacagccctagacttatcagagatgcatacgtggtacttcatgggcaatttttttttttttttttgacacggagtctcgcgctgtcacccaggctggagtgcagtagcgcgatcttggttcactacaagctccacctcccaggttcatgccattctcctgtctcagcctcttgagaaggtgggactacaggcgctcgccaccatacccggcttattttttgtgtttttagtagagaaggggtttcaccgtgttggccaggatggtctcaatctcctgaacttgtgatccacccgcctcggcctcccaaagtgctgggattacaggcgtgagcctccacacccggccttcatgggcaatttaaagaacttcagggcagagtgattttcatgtctagagtgactttcgccttttttttttttttttttttcgagatggagtctcactctgtcgctcaggctggaaggcagtggcaccatctcagctcactgcaacctctgcctcccgggttcaagcagttctttgcctcaacctcccgagtagctgagattacgggcacctgccaccatgcccagctaaatttttgtatttttaggagagacggggtttcaccatgttggccaggctggtcttgaactcctgacatcgtgatccacccgccctggcctcccaaagtgctgggattacaggtgtgagccaccgagcccagccaattttcaccttatgcaatgactctgggacttcatcttggagtaaaatgtgattccattttatcaacccttcctgactcctcacacatcactactctttacaagtatgctactacagaatttcattcagagtgctaaagtaagaaaaaattctgaattcatcttgacataatgatgtctgaattctgcttgacataaagatgtctgctatactatcactcaaacttattcttacaaaataggaaaaatgtcagaattcaccgctatgtaattcatccatgtaatcaaaaaccacctgtaccccaaaagctgttgaaacaaacaaaagaaatagcaaaaatgtgcttttctgatacctgtcaaccaaacagtaactgactgcattattcttttcttccatgagagcccactagtccaaagagcaacagaaatgttatgtctttttctggcaaaaggaggtaagtggtggagccgtgtggccggaacactaaaagcttcctgcccaatggtttggcgttctcaggctaggacaaagttggttgtataagtaatccaaccactactggaaaaacacacatcgaagcgtcaatgaatgcacctgtagtcccagctactcgggaggctgaggcagggttatcacttgagccccaggagttcgaggctgcagtgagctacgattatgccactgtactccagcctggacaacagagcaagaccctatctcaaaaaaaaaaagtttcccaggggtcattaaataaggcataatggaattgtccatttcctcaatcataaatccctttcttaaatcatataacttcatgacaattcctttaagggagattttctccgtttatcaggagcaataccctgcagtattagaaatcactatttctgaccgggtgcagtggctcacacctgtaatcccagcactttgggaggccgaggcgggcggatagcctgaggtcaggagttcaagaccagcctggccaacatggtgaaacccggtctctactaaaaatacaaaaattagctaggcatggtagcggttgcctgtagtcccagctactcaggaggctgaggcaggagaatcacttgaacctggaagcggaggttgcagtgagccgagatggcacccctacactccaacctgggcgaaagagcgagactccgtctcagaaaacaaaaaaaaagaaaaaaagaaaagaaaaaaatcactatttctaatatcattagccttaaaaactcaataaacttgcaaaggcaagagttcctgcaggcagggccgcgcgtggtggctcacgcctgtaatcccagcactttgggaggccaaggcgggcgggttacttgagctcaggagttcgagaccatcctggccaaaacggtgaaacccccgtctttaccccaaaaaaaaaaaaaaattagccgggtgtggtggcgtgcgcctgtaatcacagctactcaggaggctgagacaggagaatcgcttgaactcgggaggcggaggtcgcagtgagccgagatcgtgccgttgcactccagcccgggcgacagagcgagaatccgtctcaaaaaaaaaaaaaaaaaaaagttcctgaagggaaaagaggccccttgggagtattctccaacctcacccaaactattcaacggtaggaattctcaaccttttaagaatggtaacgatgtcatttttcaacactttctctcttctctgccgtccgcttcagaaattaaagtcattcccttcccccagttccaagccactcacgaggtgccagcttgcaaaaccggggcgttggcacgagtctggtaaatgcatgaagcccccacagtccccagaatctgaggatggcacccaaggcctgcattctcctagcgtcgtcctctctaagcgcacaattcctttccccaaaaccaccagaacccccagccctcgccaaagacaatcaaagcctagaaagggttctctttcctttccttctgattcagaaaccgcttctcacccgcaccacctccccacctccactttcccttctgccgcgagcccccggccctccgtccacccgccgcggcctccccagcgcccggagctgccgtctcccctcccgcactcccgtttcccctcctgaggggcggaacgcttacctgctcgatggccagctgcacctcgggcgtgagctgcagcacggcttccagctcctccacgaactccagttcctcctcctccatcattccgccacccggccccctgccgacccccgccgcgagcccaactcaggcctccagccgccacccaggccccagcacagcaactccctcgcggcagcgacctggtgagcccggctccgtcagccgctctgtcagccgctccggcacttccggcaggccagggcacttccgggaccggggaactgtgggatcacggcggactgagactggcggcgttcctgtcacgtcaggtgtctcccgggcaacgcagtatcccggcggccccgcgtggcctcagcgcgtccttaggatgggcggggcctcttccctccccaaggcgcgccccgcactgaggaccccgaggttggggtagggtctggcctccagcaggacgcccggatgaaagtcagccctgcggcgtcgccaaccgcagcccacagcctccgcgggcagcgcagcggcgacctctcagctcccggggccccctcggtcagtggcagcgggtgtccccggccacgggggcgacgtgatcccagctggcgagtggcgatgtcgccaaggacattcgtaggacgggacagtgcccactcgatagaaattccccgtgcgccgggctctgcgcagaagcttttcgaggtgactgcagcctccttatggggagaaacgtcttttttttttttttttttttttttgagacggagtcttacttgttgcccaggctggagtgcaacggcgcgatctcggctcactgcaaccccgcctgctgggttcaagcgattctcctgtctcagcctcccgagtagctgggattacaggcgcccgccaccacgcccagctaatttttgtatttttagtggagacgaggtttcaccatgttggccaggctggtctcgaactcttgacctcgtgatccgcccgcctcggcctcccaaagtgctgggatgacaggcgtgagctactgcgcccggccagaaacgtttttttaaagccagatgacgcagcgccctggagctggggagacgtttactgaggttgaatatccgggatctaagtcctgaatagtccaccattgataagttgtgtgacttggaacaaattactaccccgcgtcgatgtggagaggattaaacattaacagcgcgatgtaaattcaagctggtaatacaggaaatagtgaggtgcccagcccttacccccacaaaggaacaaataagccagatcaccgatcaccctgtgaaaccacctttcctgcagacactgaaaagaaggagggaattgcagcccaaggaggacccgctccaccaggtgaaccgggaaactccaggagggaaacgcgttggccccactgaacttttttttgttgttgttatcagagttgctcaaagtaaaaaataggagcagtatgattttttcttttatttttaattgacaaataataattatataaacaatgtaatttctaacaacaaaggaatgctaaaaaatatacattaaaaaaagaaaaaaaagacaaaataaaatatacattgaacctggtgcagtggcacaggcctgcagccccagctactcaggaggctgaggcagggaattattgactttctgagattgaatatcaggggtctagatctcatcccaccactgaggatcgcttgagcccaggagtttgaggctgcagtgaggaatgattcctttgcgccactgcactccagcctgggccacaaagggagactctgtctcttaagtaaacatagaatattattgattcataaaatcatgattttgaaaattaatgacatgaaaaatatgcacaatatatttcagaaagcaaaatgtataatttcatttaaaaaatgcatagcatggtcccagctttgtgtgtattctgtgccaataaagctcacagcaaggaaatattacttttctgcacgtgatgaatgtacatcctttgtacattttcccaaatgtctacaatgagcctgtagttctctcatgctcagaaaatatgaatgcctttttctaaaaggaaaaggtaattatagctacttattttggactttttttttcctttaaaaaattaagatatttacatacagtaaaatttactcttgcaatttatgatgcagtgagttttgataaatgtgtataaacgactgggcatggtgactcacgcctataatcccagcacgtggggaggccgaggctgccagatcacttgaggtcaggggttcgagaccagcctggccaacatggtaaaacccgtctctatctactaaaaatacaaaacgtagctggccgtggtggtgcacagaatcacttgaacccgagaggtggaggttgcagtgagccaagattgcaccattgcactccagcctgggtgacagagcaagactccatctcaaaacaaacaaacaaataataagaaaacaataataaaacaaaataaataaatgtatataaccatgtaactactaccacaatctagttataggacaatttcattcccccaaattccctcttgcctcaccccatccactggcaaccactgacttgatttctgtccctatagtttttgtttttgtttttgtttttttgagacggagtctcgctctatcacccaggctggagtgcagtggtgcaatctcagctcactgcaacctccgcctcccgggttcaagcgattctcctgcctcagcctcctgagtagctgggatgacaggcacgtgccaccacacctggctaatttttgtatttttagtagagacagggtttcatcatgttgcccaggatggtctcaaactcctgacctcaggtgatctgccagcatcaggctcccaaagtgctggggttacaggcatgagccaccacgcctggcctgtccctatagttttgatatttccagaatatcatatagatggaatcatacagtatgacaccttttcagtctggcttctttcatctgtcataaagtatctaaaattcatccatgttgttgcatgtatctgtggttcatgtcttcttgctggtattccactagatgaatacaccactatttgtttatctagtccctggttgaaggacatatgggtttttccagtttttggcaattatgaataaagctgctataaacattcatgtacagatttttgtgtgaacataagttttcatgtcacttgggtaaatatgtagatgtgggattgctgtgttatatgatatgtctgtgtttaactttctaagaaactggtaaactgttttccaaagtggctgtatcactttcacattgctaccagcaatgtatgagagttctgtttgctcagagagcttatttttaatgatgataataagaaggaaaatttcctagcccttactatatgacaggtaccattcgaagcatgttacatgcattgtctcttttaattcacacagcaattctgaggttgttagtttttattactatacccatctaacagataggagatgaagatctagttaaaacaagcaacaaaataaaaatttgcctaaggccgtatacctaagtcttcctgccgttcattaagctagtcaatacatttattgaacacctgttcctgttagcgacaggtactcaagctaggtgccgggaattcagcagtgaacaaaatagaccccatgcttgcctctacagagctatttctatgtatgaaaagggcatttgtacaaataaacatataattgtgatagatccgataaaagagaagtaaagcacatgttgagagactatatggttagagttctgattggattaggggtcaggaaagccttttctttctttttctttttctttttttcttttttttttttttttttgagacagagtttctctcttgttgcccaggctggagtgcaatggcgcgacctcggctcaccgcaacctccgcctcctggattcaagtgattcgcctgcctcagcctcctgagtagctgggattacaggcatacgccaccacacccggctaatttttgtatttttagtagagacggggtttctccatgttggccatgctggtcttgaactcctgacctcaggtgatccgcctgccttgacctccctaactgctgggattacgggtgtgagccatcaagcccggccaggaaaggcttttctgaggaagtgatttttaagctgaagccaagggttggaagtgaagataacacatagataaaaggaacagaatgtgcaaaagccatgagtatgaaaagagtcggccagggtgatggaagtttgaaagcccaagggagagtgatacacgaggaagctggagaaatgggcactgccggacggtgaaggatctggaaggtcttcttgaaggaatgggaagcctctgacggactgtaagcagaggaggggcatgaccaggtttaccatgcctgccatcagccctggtctctctgttttttgttttttgtttttttctttgcctctgagcttcccatattgttgtggagaatcatgaaaccagggtgaccatgttcagcacaaattcctgttgccttatttccactgattctcattgtccttctcagcatccattgtccgttctcaatggcactctcccgtgacccaaaacctttgcctcctctggagctcccaactccatgataccccttctccctctttgcagataagctactaataatataagtttgagtttaggagagttatgcagtacaaagaagtaaaggaagttaaaagagcagagagataggttgacacactgggttttaaaaaacttctttaagtaataacagactagattgattcatttatgtcaaacaaaagaaggaaatacctttgacaggaggtggaaatctagaaagagattgtatacttctgacagaaataaaatgtggaagtttatggatatgagaaatttgggtatgaaaataaggagcacgtgatattttcacaaatgagctgggctcaaaaaaaacaacttccaggctgggcacggtggctcacgcctgtaatcccagcactctgggaggccgaggtgggtggatcacctgaggtggggagttcgagaccagcctgaccaacatggacaaaccctgtctctactaaaaatacaaaattagtctggcatggtggcgcatgctggcgcatgcctgtaatcccaactactcaggaggctgaggcaggagaatcacttgaacccgggaggtggaggttgcagtgagccaagattgtgtcactgcactacagctttggtgacaaagcaagtctccatctcaataaataaataaaatacatacatacatacatacatacatacatacatacatacaaaaaattagctgggtgtggtggtgggcacctgtaatcccagctactcaggaggctgagacaggacaatctcttgaacctgggaggcagaggttgcagtgagccaagatcgtgccattgcactccagcctgggtgacacagaaagattctgtctcaaaaacaaacaaaaaccaacttcctattttgctgtaggatagggtatagtgatgacaaagtttcacagaaaacatttttctaccttgaaatttcaccgtctgaggcagaaattcagtctctaatactttaaaagtaaaacaaaacgaaaccttggagactgtggcctttagtaggcgatgggggaggatggattggaagggagtatacagtaggctgtgagagagatgggggaggagggattggaagggagtatacagtaggatgtgagggagttgggggaggatggattgggagggagtatacagtaggctgtgtaggagatggggagaggaattggaagggagtatacagtaggctgtgagggaggtggggaggatggattgggagggagtatacagtaggctgtgtaggagatggggaggatggattggaagggagtatacagtaggctgtgagggaggtggagaggatggattggaagggagtatacagtcggctgtgagggagttgggggaggatggattgggagtatacagtaggctgcgtaggagatggggaggatggattgggagtatacagtcggctgtgagggagttgggggaggatggattgaaagggagtatgcagtaggctgtgtaggagatggggaggatggattggaagggagtatacagcaggctgtgtaggagatggggaggatggattggaagggagtatacagcaggctgtgtaggagatggggaggatggattggaagggagtatacagtcggctgagggagttgggggaggatggattggaagggagtatacagtaggctgtgtaggagttgggggagcatggattggaagggagtatacagtaggctgtgagggggttgtgtggcaccccttgaggaaacgtcagactaagatggaaacataacaccaaacctcacatgaggagtttccataacgtttctcaccttgccaaaaaatgctttacgtatactgtctagaaataggaattttaaaacagcctttgttaatgaaattcagtgagatctctaaatgtcatgtgtctgtgtcaatgtagcgttaataactctgtggaaaggaatctccaatatccggttatatttgcaaccttgttgtcagagcgcagaggtaactgccccgtcatatacggagtagacactgtgcaaagtgtgttcttccataagatcaagacggtatctttccacataagcttccctctctgtaaggaccttctccaaaatagctgagccttctgtaaaactgcttgtgaaaaaagaattgcaggacgtctcaattacctggtccatgcccactaaatgccagtcaagcagtacctttcctcaacagtgacagaagcagcaatacctcccacacatctccaaaatgccccctaggcttcccaagcaatcacctttagatcctatcgtcactctgggtggcacaaggtcccaggccaacttgtagtggaggaatagggtataatttccccttgaaatcagctcaaaatgttctcttggtgcttctttatggactgtttctagtacgtggcttttcacgatgactggttctttcactgtccttgattcctgaatttcctgaatctcctggagcctggcatttgttcttgattgacattcggatggttctgaaccctccctgtatcctggacaccagttttgtttaggttggtactctggttctctgcatgcccattcttgctaagccggtcatgatttccagctagtttcagcagctcccctgttcccacggccattttcacatgatatctcccaaaggcttttaaaatgaaaaccttttacactggctacgttgggttcatattaaagcaatcctttcccttactcaaggaagtaataattatataggccaaattaataaaccctcttgtgcaagttttatatatgccaacaactataaaaacactttttacaaaactgacattaactagtacaatcattataatgtagctaacattaattcatcgtatctaaaacccttaagcatcttccataacctgttttttcgactccacttcttcctgcattcccagagctggatcttcagctgccacgcttcttcctcgtgtacaacagtagttcttaatctgttttgagtctggaccccttggaggagctgaagaactctacacagatcctttccctggaaaaatacacatttgcttagcattttgcatgcagttttaatgaagggtgtttcatagaatatacatacatatatatatattttatatatatataatatataatatatatatatatatatatttttttttttttgagacaggatcttgctctgtcgcccaggctggagtgcagtggcgggatctcggctcactgcaagttctgcctcccaggttcacgccattctccggcctcagcctcccgagtagctgggattacaggcacctgccaccacgcccggctaattttttgtatttttagtagagatggggtttcaccgtgtcagccaggatggtctcaatctcctgaccttgtgatctcccgcctcggcctcccaaagtgctgggattacaggcgtgagccaccgcgccctgccgtttcatggattatttatttatttatttatttagagacggagtctcgctctttcgcccaggctggagtgcagtggcgcgatctcggctcactgcaagccatggaatattttttaacctttttttttttttagcccacgcttctttctgctaaacctaaaaatgttgtgaacaaacctcccacatgcagtattttgacaagaggtatgatcttcatcactgtaatttgacaatcactgatatgtaaattacattctcccttcaccagcccagaatattttgctcagctaaccttattttagctttccttcaggaaatcagtagaaagtttatatttcctggggccaggcgcagtggctcatgcctgtcatcccagcactttggaaggctgaggcgggtggatcacgaggtcaggagttcgagaccatcctggccaacatggtgaaaccccgaaaaaaagaaaaaaaaatacaaaaattagttgggtgtggtggtgcatgcacctgtaatcccagctacttgggaggctgaagcaggagaatcgcttgaacccgggaggcggaggttgcagtgagccgagatcgtgccactgcactccagcctgggcaacagagcaagactccatctcaaaaaaaaaagaagaaagtttatatttcctaaatataatgttgttcaaggccaggtgtgatggcttattgggaggccaaggcggcgagaggatcacttgaacccaggagttcaagactagcctgggaaacagagggaaacctcctctctaccaaaaaaataaaataaaataaacaggtgtggtggaccgcatctgtagtcctagctgcttgggaggatcccttaagcccaggaattctaggctgcagccacccatgaccatgtcagtgcactccagcctgggtgacaaagcaagatcttgtctctaaaatatatttaaactcctgattggacacggtggctcacgcctgtaatcccagcactttgggaggctgaggcaggtggatcacctgaggtcaggagttcgagaccagcctgaccaacacggtgaaaccccatctctactaaaaatacaaaaaattagctgggcgtggtggctcacgcctgtaatcccagcaccttgggaggccgaggtgggtggatcacctgaggtcaggagtttgagaccagcctgaccaacctggtgaaaccccgtctctactaaaactacaaaaaattagctgggtgtggtggcacatgtctgtaatcccagctactcaggaggcttgtctatatgttggtctgtttctcctttttttttttttttttttttttttaaatacagggtctcacttagccctccaggctggagtgcagtggtacaatcatagctcacttcaaccttgacctcctgggctcctaagtagctgggactacaggtgcacaccaccacgcccggctatatttcttcttttaatggctacagagtattccatagttggaacatactgtaaattacttattctattcctttttttattttttgggacagagtctcactctgtcacccaggctggcgtgcagtggcgctatctcggctaactgcaacctctgcctcccaggttcaagcgattctcctgtctcagcctcctgagtagctgggattacaggtgcgtgccatcacacctggctaatttttgtgtttttagtagagttggggtttcgccatgttggccaggctggtctcgaactcctgacgtcaagtgatccacccacctcggcctcccaaagtgctgggattacaggtgtgagccaccacacccagccctatttattctattcctaaatatttgggttgtttctaattttttgctattataaacaatattatatatatatatatatatatatatatatttttttttttttttttttttttgagacggagtctcgttctgttgcccaggctggagtgcagtggcacactctcagctcactgcaacctccacctctgggttcaagcgattctcctgcctcagcctcctgagtagctgggattacaggcgcacggcaccacacccagctaatttttgtatcccaaagtgctaggattacaggcgtaagccactgcgcctggcctaatcctatattactttaattctaccagcactgtaaaaaagtgcttacgtccttatatacttaggcacagtggatattttccgtcttttccatattcactgataaagttgtgtgtgtgtgtgttattttgagagacagggtctcgctctgtcacccaggctggagtgcaatggcaggatcatggctcactgaagcctccaactcctgggctcaagggatcctcccacctctgcttcccatgtagccaggactgcaggcacatgctaccgcacctggataatttttaaatgtttttgtagagggtcttgttacgctgcccaggctggtctcgaattcctggtctcaagtgatcctcgtgcctcatctccgaaagcactgggattacaggcatcgcgctcggcctacttataaagttttcaatgggcctttttatatttcttctgtgtatttctagtttgtatcatttgaaaaattcttttggatcatttttttttcttttttcttttttcttttttttttttttgaggcggagtctctctctgtccgccaggctggagtgcagcggcgcgatctcggctcactgcaagctctgcctcccgggttcacaccattctcctgcctcagcctcccgagtagctgagacgacaggcgcccgccacctcacccagctaatttttttgtatttttagtagagacagggtttcaccgtgttagccaggatggtctcgatctcctgacctcgtgatccacccgcctcggcctcccaaagtgctggctaatcatttctgcggttttccttgtccttgttttcctcacaagtgtgacatgcttgccacagacaaaatgtagtaggtctgaagcccagcgtggtggctcatgcctgtaatctcagcatttgaggaggcaaggtgggaggctcgcttgaggccaggagtttgagaccagcccgggcaacagagtgaggaacacacccccacctttgttcttctgacacagtgtctccgtctgccactcaggctggagtgcctggtacagtcacagctcactacaggctcaacctgaggtgatctcgcacctcagcctcctaagtgcctggggctacgggcacgcaacatcacaacaagtttttttttgtttttttttttttttgtagagacgggatttcaccacgttgcccaggctggtctggaactcctggcctcaagcgatccgcccaccttggcctcccgaggtgctggatttacaggagtgagccactgtgcccagccagcccttaaatatttttgaaacctgagtttagaaatgtttgcttttagataggtgtgactatctgcaaacaagccagattttgcatttttagcaaaagaaacatgtatgtgaaagtgctttgaaaaatacacagcaatacataaaagcagcactccatcatcggttccttgtgtaaattacggtttttaccggcaggaatcagagcggagtctcccgtgtagcatgcagctgcggtcgctgtttgtagaaaccatgggtttggggtgtggctgtgcttcccggcctcacagtttgctcttgcaaagaatcttaagataaaaccaaggaagctgccgtctggagtcgggctaaggccacctagggaatctgtaatccagcaggtgcttgttgagaagtttaacagcagggggctatgccttgaggatccggtataaagaacaagaatcccctgcctgtgccgagcacacagtttaacgttttgaaaataggatgtcatttaattctcccagccatcctggagggtagaggcaggaaccgccattttactggggaaggaggcaaagtgttttctccaggtcacacagcttccaggtggtggagcgtggactggaactcaggttctcggatcccaactccaatgcgctatgcagtggctgcctcccaggcagacggcccctaccgtcaggggcatgtggtctgccagagaaacgcacacacacatatcagctcagggctacactgatcaggcaaacaaagtgaaggagaaatgaagagcagggtgattgacttctttctggccacactcaaagtcctaagagcaagtcagctcattctctgaaccgtatttcttcagacgcagtgtggcttttgttgccaaagagaatgaagttccgcagaaggctgttgttctcctctttggacacctccttcctttctttccgtgtctgaccttttcctcgtgttctgttgttgtgccaatctttagatcttcatctctatgtctatcttcctgtatcaaagtgtatactggcgttgtgtgtgtgtgtgtgtgtgtgtgtgtgtgtgtgtgtgtgtgtgtgtgttgagacaggatctcactctgttacccaggctggagtacagtgctgtgatgatggcccactgcagcctcaacctcccgggctcaagcaatcttcccacttcagcctcccgagtagctgggactacagccacacgccaccacacccggctaattagtgtatttttttgttttaccatgtcgcccaggctggtctctaactctcgggctcgagtaatcctccggcctcagcctcctaaagtgctgggataataggcaggagccaactccggggctcaagtgatcctcccgcctcggcctcctaaagtgccgggataataggcaggagccacctcctgggctcaagtgatcctcccgcctcggcctcctaaagtgccgggataataggcaggagccacctcctgggctcaagtgatcctcccgcctcggcctcctaaagtgccgggataataggcaggagccaactccggggctcaagtgatcctcccgcctcggcctcctaaagtgccgggataataggcaggagccacctcctgggctcaagtgatcctcccgcctcggcctcctaaagtgccgggataataggcaggagccaactccggggctcaagtgatcctcccgcctcggcctcctaaagtgccgggataataggcaggagccacctcctgggctcaagtgatcctcccgcctcggcctcctaaagtgccgggataataggcaggagccaactccggggctcaagtgatcctcccgcctcggcctcctaaagtgctgggataataggcaggagccaccgtgcccacgtgcccaccccctgtgccgtatctttctatgtctcttcctatttcttcattctccttttgtccttcctgccctctctctgcttcaatggtccctactgtggaaatgaagtatgggtctacacaaagtaacttttacttcagaacagatgtccattttctctgttagggtatttatttatttatttgagacaggttcttgctctgtcgcccagactgcagtacagtggcacaatctgggatcattgcaacctctgtctcccaggctcaagcagtcctcccatctcggcctcctgcgtaactgggactacagttactggggtgggttccacccatctggctttttttttttttttttttgagagacagggttttgccatgttgtccaggctggtctccaactcctgggctcaagtgatccacccaccttggacggatcccaaagtgctgggattaccgttgtgagctgctgtgcccaggctgtgttaggatttttaaagtggatgagcggacagagacccctaagttcccttttggttcgggagctcactacgtggaggcgcttcacgtgtgatctcacttctttctcatgtacatgattttcccagataggaggaaaaggtcctcgatcaagggtagttgcccacacatcacatatcttaatggcattcacttgagaactcacaaagtattttacaagtaaatacggtattttccatttaaggctgaagaaaccaggaaacagatatggggagagtccctgtgtcctattccttaatgatagcgagtggggtccagaggaatgggggagaggagatggaaaggcaggcccacatgctttcatggcagaaaaatccctccgtagccctttagaatggggagctttataaattctctgttcaagggggcgacagtctacatttggtaagtgagttttacgttggcattaagtagcccaaatttcactctggaaacccacacaagcagtgtaatgacaaactggtgaaacccagccccacagcctggagtagtggaaattaccctggaacaggttctaacctgagccttgtcccttcacagggtggtgagtcagcggcccatcctgcacttcgctttcttcatgtgtaacatggaaataacaggtttagccaacctcactgggttattttgagacccaggtgagctactacacgtgaaagtgctttgaaaatttgtaaagttacatataaacagagaatactgttcatggcagcatcagagcccatcaattcaccatacaaatttatgagtaaataattaggaacagtattcatcagaaactatattgtgaaagattattattccctccttgcttatcaggcttgaaggcagtatagtcatccggcacatggaactaaaggcagaaagtactgagtttgaatcccagctcgccaccagcagtgtgacctggggcgatttttaaattgctctggtctgagtctcattttgctgatacacacaaacacacacacacacacacacacacagagtgagaataacatctgttgtgaggatttaatgagacaatgtagacaaaacatctgacataggacctagcaaacagtaagtactcaacaggtatgagctttggaaagtatgaaacatgtattgcaccctcagaatgtgccagcctcacttggggtacaaaatgaaaagacacagtccttgtttctaggacctaacagtctggtggagaaacatacaaatgagaaaacaacagcctcgttacccaaacccaaaggcagacctggaaaccttcttagagaaggaaacagctgattcgagacttttgaaggatgaggggaagtttgtgtaaaccaggccccgtgtttttcatttggccttaccatttgccgacaggggtttgatcgcttgaaaagctaaggttcatgtttctgcttgttagctttatggtgattcaacataaacagtctggtgacttcactgagcatggtgttgaaactgatcttacttgctattttcttttttcttttttttttttttatttgagacagagtcttgctctgttgcccaggatggagtgcagtggcacgatcttggctcactgcaaccttcgcctcccgggttcatgccattctcctgcctcagcctcccgagtagctgggactacaggcgcccgccaccacgcccggctaactttttgtatttttagtagaggccgggtttcaccatgttagccaggatggtttcgatctcctgacctcgtgatccgcccgcctcggcctcccaaagtgctgggatgacaggcatgagccactgcgcccggcctttacttgctattttctatacatgaaacatcggttgttttgttttcaactcataaagatgccttacagcttcttgtgtaggggagactggttcccaccactcaaaggtgccagcatactcactgccaagctgctgctccctttaaggagggaaggcagggaggacttgtaaccacctgtcactctctggaaacactggcgctggaggtcactgtgataaatgcttaggaaagagacagtggactgcacagagtcgttttcctggagagaatggagagttcacaggtagctggttttgtccacaagcgaatgtgaaaataaagagagcgtcgcatttgtcagatatcttgggaccaacctgaagtggctttctcctttcactgagtatgtcagcagtgaatttgggagttagagatgttgccctaagtggacgaagtttgaggcttttcttgaggctgtctgccaccgtcctgttggctaagtcccttttcttaaccacatataggaagatgttagaggctacattcattccaaaaggtcacagcctagtaactgatactaccactgaaggaaaactatcttttaaacctgagaaacatcttcagactccatcatgaatgaatccaaattgaaaaaaacaaaagctgtgctcactctacaccagttcctacatcactaactgccgtgttaaagtaatttaactggcacctaacagaaatcatctgccactttgtaaaagtcatagactcataagaatctagagctggaagaccgttaaagagctagtgatccagcctccctctcatttcacggaccagcaaatcgtggcccagagagccgagcccagctgttccgaagtcctcatacgggattttggtcagcattttgcatgacggtgatctgaggagacccgtcatacctttcatttgtagtaacataaatgaactgtatttcccaccccctacgtttgttagctgaggaagatacagaccaaagcaaaataaagctggtagttcctaaaggacagaagccaatgatactgaaattcctgtcttcatccatgtgattggtgcttggcacaaatgaaatgtattccaattcattcaagtttagacgcctgtcccgataactgtttttttgtttgtttgtttgtttgttttttgagacagagtcctgctctgtggcccaggctggagtgcagtggcgtgatctcggctcactgcaacctctgcctcccaggttcaagcgattctcctgcctcagcctccagagtagctgggactacagacaggcaccaccacacctggctaattttgtatttttagtagagacggggtttcaccgtggtggtcaggctggtctcgaactcctgacgtcaagtgatctgcccgcctcggcctccccaagtgctggggttacaggcgcgcccgaccccgatacttttaaataacgacacgttgtgaacaacaccacagtccctacgcctctggatggtgtctccggatagatccaaagccgagaggcagtaagagcctgcagcctccacagtccgcctcctggtgcaggtggagaggggctgctggaggcccccggacctcacgcttcctgagggccaccccggagcggctgcagccgctggcggcaccgggaaaagcatctcggccgtgcggggagaggccacatcctgaggcctcccaccgagaagcaccagggcttggtggacggggcccgcgaacccagggccacacgccgcctccctccttccttccccgcgggcctcgccccaccccggagggggttcctacctggcttcctcggccccgcgcccaccccgccccttcgcccggggccggcgagaagagcaggtcggggaggggcgcgtccgctgacggaacagaagccgggagccgcggcccttcccgcctccgcctgggccccgcggccgctcgggagggagcggcggactcggaacgcgcgcgcgccgcggccccggccacagccgccgcctcggtccccgcctccgcccccgcccacccgcccgccggggacgccggggaaccctccgggcccagggaccgcgagagaccccgccccgccctatcgcagccgccgggcctggtcacgcgcagagccgcgccgcgggatcggggccagcgccgggcggaggcgggacggggacgggggcggagggttgaaatcgcgcggccgggccggggcgcgccgagccgaacccagccacgcggcgccagcgaggcggccggacccgcagccccgatgctgctgacgctggccgggggcgcgctcttcttcccggggctcttcgcgctctgcacctgggcgctgcgccgctcccagcccggatggagccgcaccgactgcgtgatgatcagcaccaggtaccggcgccgccgagacgccccccgaggcccggggcgctgcccaccgcaccccacccggccgcggggcccagggcggaaaaggggggcggcaggaagcccgggggctgctccctccgcgtcccggcggcccgagtttccgaagcccctccgcgtcctcccctggcgggagcggggccggggcgggcgggaatggccgatgagcctccggagcccgctccccacatctgcctgcggctggggagagtcaggccgaagggccgggccgggctccctgcggtcctcggaccggactgagcgcgcgcgctgttctctccgcccgcgctaggctggtttcctcggtgcacgccgtgctggccaccggctcggggatcgtcatcattcgctcctgcgacgacgtgatcaccggcaggtaagagcccgggccggggccttgttgcaaatgtcacatttcagtagctcgcaggctctggctctcgcagcacacgcgctcagaaagctgactaatgggaaaagctggcaccacaatgggctccttcttcctctccggagtcttcgggcacccccagcttaggagaaagtccacggaaatgagggaggacgacagagtcggagtctgatttcaggtggtgtgagccagggatccaggtccttcatggaagagataagcgtggaagcatttacgactgggagtgtggcttgattcttgcagttggcttcactgggttctcactctggagcatcactggctaacagacgtccagtgtggttagcagagccccctccatggaaaggaaccaacccaccacccccttccacgcaaacgccgctcttgcttttcctgcagatttgctaaaggtgattgagaggttcccagcgcttagaacacggacttgtacgtctatcagaggtcagtccagaggcaggtcaggaaatgtgcacctatctgcagttccagtgaaacaaatcataaattaagaccagaatagtcgactttgtacagtagttagacctggacaatggtggtgcttttattatttcaagccttttttttccccaccggtcttgctggaatcacactcactttctcccaagttgaaggaccacagtcggatgtgcaggaagttgaacggcctttccaggccctgctctcctgtgggctctgccaagtcctgcttctcacctgctgagactgaactgcgaggggcctgagcaagctgtccgtctcactctagcctgcggtcttacctgggatcaatcctgctgtcatgatttttgtgcttttcttctgcctttttaaaaacaaaactggctattggcgatgaataagtagatgctacgatagatcaagtgacatcgattgtagacaccaaaggttaatattggtgtggctgggtacaatttttcttcttcttcttcttcttttttttttaaagacagggtctcactatgttgcccaggctggtcttgaactcctgggctcaagtcatttttctgcctcaccctcacaaagtgctgggattacaggcatgagccaccacacccagcaaattttttactttttttttttcctgtcgagacctcaggctgaggtgcagtggcataatgacagctgactgtagtcttgaactccagggttcaagccacccgtcttccttagcctcccaagcttggactacaggcacacactactacacctggctaacttttttttgttgttgttggtagagacaggggtctccctgcgttgcccaggctggtcttgaactcctgggctccaacgatcctcctgcctgggcctcccaaagtgttgggattataggcgtgagccactgcacccagccaaaaaaggcctttcagggttcatatactatatactgaatatttttctattatatgccttctcattttatgccttcacatagaatgcgattagatagaaggagttaaaaatccccccaaattataggcagaaggtggtatggggccaaggatttagtcagattcttaaaggattcagacactaaaatgacaaagtcacagctccaggtggttttctcaatttaagtacttaattcagatagtacgttgttgttttagacagggtctggctctgtcacccacgctggtctgaactcctgggctcaagccattctcccactcaggcctcccaaagtgcagggatcataggtgtgagccaccgtgcccagcctgtatagtaccttttaacatttaaaaggactccccctccccgccgcctttctttttattgagatggagtctcactctgtcactcagactggagtgcagtggtgaggtctcggctcactgcaacctccacctcccaggttcaagtgattctcctgcctcagcctcctgagtagctgaggttacaggcatgtgtcaccacgtctggctaatttttgtatatttagtaaagccatgttggccaggctggtcttgaactcctgacctcaggtgatccatccgcctcggcctcccaaaatgctgggattacaggcatgagccaccgtgcccggccgactttcccacatttaattatttaatcttcactgcagttttgacaggtaagacagacaaggattatcatcttcattttacaaagaaagttaaatcacaggctagtgatagtgaagattataatccagatctcttgctaataaatcttcagaggattctactcatgagtcacaatttcagatctcttctctgaattggtgaaaacatgaaaaccctaggttcccttcaaggggagaggccagttatatttcagctaaattttagtagctgtttataggtattttacttgaaattgcttgaagaaagcacctgagaccatagatgggcattggaataagtatggcatctttttggccaaaagaaacctagctaggtcgggtgcggtggctcctgcctgtaatcccaacactttgggaggccgaggtgggcggatcacttgaggtcaggagcttgagaccagtctggccaacatggtgaaacccccatcgctacttaaaaagaaaaaaaaaaagaaaatagccggacgtggcggcaggtacctgtaatcccagctactcgggaggctgcggcaggagaatcgtttgaacccacgagtcagaggttgcagtgagctgagatcgcgccactacatccagcctgggcgacagagcaagattttgtctcaaaaaccaaaaccaaaaaaaaaaaaaaaaaaaaggaacctggctaatgaattcacctacaagtgtgttatacttgccattacttgcttgccttatttgtttattcattatttacgccgtggtaagtgtggagttgctcaagagcacaaattcagatggcgcctccgtagactgtatttccagtgttgcagttcagcggactggctgcgtccgaaatcagagacaaagttaatacagatttcagggccctcggcttacaatttagaatctctggggactggagcgcttaacaagcactgcaggtgattctgatgttcaggtagtttgagaaccataaaacgaaatggttttctacctaatacgtggatgcgcatcaaacgtttgctgaccatgtgaatggaatcctcaaatagtacatgatttcaatttagatgtttcttcacagaaaacatctgtggaatgcttatcactgggaaccacattgtatgaattgtagaggcttcccttctaatctgctctaggacggtgatcaactatgatttccattcagcaaatactgattcagcccctttggataagtaaatgggaaaactgtcttttgacctagcctctctcctggtacctaaccgctgtaatgtggcccttgagctccaggctcatttccagacctgcttttttttgttgtgttttgtgtgttttttgagacggagtctcactcttttgcccaggctggagtgcagtggcgcgatctcggctcactgcaacctctgcctcccagattcaatcgattctcctgcctcagcctcccaagtagctgggagtacaggtgcacaccaccatgcccagctaatttttgtatttttagtagaaacggggtttcacaatgttgataaggcgagtatcgaactgctgaccttgtgattcacctgccttggcctcccaaagtgctgggattacaggtgtgagccaccacgcccagcctccagacctgtttttcttaatggaattgagattatctctagaattgctttttgggtttttttgtttttgttttttttagatggaatctcactctgtcgcccaggctggagtgcagtggcgcaatatcggctcactgcaacctccgcctcccgggttcaagtgattctcctgcctcagcctcccaagtagctgggactacaggtgtgcgccaccacatctgactaatttttgtatttttagtagagacggggtttcgccatgttggccaggctgatcttgaactcctgacctcaagtgatccacccgcctcagcctcccaaagtgctgagattacaggtgtgagccaccgaacccggccagctctagaattgtaaagaaaatggccagggttgcctcccagaaactccatagagtggggttgcatgcagacaagagaaaactcacaggttccaggatttaagttagtaaaacccccaactgttgagcagctaaggagttaaactagaaatgttggatttgtgatttgggacactttccaaaccagcttcttggtggggccgttgaatcatttgtatatctatctatatcaaaatcagttttatcacaaaatgccagaacatctactacaaattagtagctaagtcaggcaagtagtgacagcaagctgcttcaacaggcagggctgagtgaatgcctgctttttgcctttgacactcacgaattggccctgaaactgagagcaagtggtctactctccctgtttatcagtttcaacatctttattgtaaagtatttggaataataatagctgatcaagcaccaagcttggctgtgagccttcataatggatatccacaatgatttcacgggccattcatatgctttctttcaggcactggcttgcccgggaatatgtgtggtttctgattccatacatgatctatgactcgtacgccatgtacctctgtgaatggtgccgaaccagagaccagaaccgtgcgccctccctcactcttcgaaacttcctaagtcgaaaccgcctcatgatcacacatcatgcggtcattctctttgtccttgtgccagtcgcacaggtatggccttccaggacagcagaccagcagctgggttgagctgggtgtctttttttttttttttttctgagacagtctcactctgccgccccagctggagtgcagtggtgtgatctcagctcactgcaacctccgcctcccgggttcaagcgattctcctgcctcagcctcctgagtagctgggattgcaggtgcccaccaccacgcccggctaatgtttgtatttttagtagagatggggttttgccatgttggccaggctgatttcaaactcctgaactcaagtgatccgcccgcctcggcctcccaaagttctgggattacaggcatgagccactgcgcccggcctgagctggatgtcttgaccgttacttaggagtcgggattgcccctcttttctttgccactcataggcacccattctccttgtgcctgctgcttcagagccacctcccccaggtgaatagtggaggaacaccattacacatgaaacgttcatgatcctccttaccaacatcaacatcaacatactttttcttttttgagacagggtttcactctgtcaccccgggtggagtgcagttgttggatcacagctcactgtagcctcaaactactggcctcaagtgatcctcctgcctctgcttcccaggaagctgggaacacaggcacacactacaacgtccagctaattcctgtaatttttgtagagtttctccatgttgcccaggctggtctcaaactcttggactcaagtgatcctcctgcctaggcctcccaaagtgctgggattacaggcgcgagccactgcacccggccccaacattctttttaacaaacccccagcgctctgtgattccctagcgtttgtcagaggttctatccttagttcaatacaagataaaaacaatataaaatacaaatataatacaaagcaacataacagtgccagagagcactgtgtggattattcttaggtcacaaaacacagattctcaaagcaaatagcctcctactttctccccagatccatttccccataaaagcccacccaacaaagaaaagcaatgggaaagctgaggggaaattcctcactcttgagtgcctggccaggggaaggcatgcgtttttttttttaattattcatttatttagttattcatttttttgagatggcgttttgctcttgttgcccaggctggagtgcaatggctcactgcaacctctgcctcccgggttcaagtgattctcctgcctcagccttccaagcagctgggtttacagatgcacgccaccatgcctggctaatttttatatttttattagagacggggtttcaccatattggtcaggctgatttcaaactcctgacctcaggtgatccacctgcctcagcctcccaaagtgctgggattacaggcgtgagccactgctcttggccggcatgtagttttattttattttttaaataaagagatgggggtctccttatgaggcccaggctgatcttgaactcctgggctcaagggatcctcccgtctcagcctcccaaagtgctgggattataggcgtgagccaccgcgccctgccaggcatgtgatttaaaagttcatagcttgctaaatattagaagctattagtcttatgctgtagatgaagaaactggggctctaagagtattcttatatctctcagtggtactaagtggcagagctgatattttaccatgcttactgctttcttgaaaaaagaggccgggcgaggtggctcatgcctgtaatcccagtcagaagttcgagaccagcctggccaacatggtgaaaccccatctctactaaaaatacaaaaattagccgggtgtgatgctgtacatctgtagttccaggtactcaggagcctgaggcaggagagtcatttgaacccgggaggcagaggttgcagtgagctgagatcacgccattgctctccagcctgggcaacaagaacaaaactccgtctcaaaaaataaaaataaaataaataaataagggtaacgtgcattaaattctttaagaagtgtctgggacctaccatctaggaaccagaacatctagggtgctttgagaccctaacatctagcacagggcctggcacattttgttgaaccaaacaggctgagtgtcttggcatgactaagttcgatacacaaaagtaggcttgcagccttccttccggctgtcatcaaaattcagagcttggtgtgggacgccgtcatcctgtctgaatttgcctctggatcctagggcttggaccatcaaagtgctgttgccacggaagcagcggtacagtagtctgcgcttgcctattgagcgtcctttgcccgtcacagttacccttttcagtagccctcgttggaattttccttctggtggtttcttaacctccacttacttccccttttcgtttcgtcatccgcagaggctccggggagaccttggggacttctttgtcggctgcatcttcacggcagaactgagcactccgtttgtgtcgctgggcagggttctgattcaggcatgtatgaatgaaatgacagagagtgtgagggttctgattcaggcatgtatgaatgaaatgacagagagagtgagggttctgattcaggcatgtatgaatgaatggcagagagagtgaaggttctgattcaggcatgtatgaatgaatggcagagagagtgagggttctgattcaggcatgcatgaatgaaatggcagaaagagtgtgggagggagtggattctgcttttccttcggagatggtgggtgtggagaaatccctagtgccaggagagtgggatgagagatccttcaacagccttaaaggtcagctggtcatctcagccagtgggggtgaaattgtaggtttgatctaagtttgatagtttgatacagctcattctattttttccctggttacacacatactttaatccacggttcctgtactcctgtcagctgggtggcctgggtcaaattcaaaatcactattggagaaaatgaggttatttgcacatctcaatatgatagtgttcaagaatgtcttctccaagtgttagaaaactagacaaacgtctgggcgccagggaatctgacagccaaggtcttgatgagcacctgcacctgtgtggcatttactgtggtgggacttgggcccgtcgctccctgatgcccagcttcttggtgaccttacctttttccttcctcttctattgcagctaaagcagcagcacacccttctgtacaaggtgaatggaatcctcacgctggccaccttcctttcctgccggatccttctcttccccttcatgtactggtcctatggccgccagcagggactaagcctgctccaagtacccttcagcatcccattctactgcaacgtggccaatgccttcctcgtagctcctcagatctactggttctgtctgctgtgcaggaaggcagtccggctctttgacactccccaagccaaaaaggatggctaaatgctcctgggagtcaggcgcagcctcacaccagctgcctcctccactcagcattccatggaccaaattgtgccctgggtagcctcagactttgggtattgataagccgatggatttgagtttttctaaagaatattcatattacctccttcttctaacttgccctatttgcaaaagcacttttgtagtaacaactattgggtcctgtcagacctccacggacagcaaagtggttttaatgcaagcccaaggatccttcttaaggtcttatctcaagagctctgggaggtggaagcatggggtgggatcggtggaccagggtggtaagtgtctgcacatctgcctgtccctgtatcagcggctacccaccttccaaaccactcaggacagtacccgtggcactgggcccgcagaagcaagggatgacttggttcttggaagtaatgtcgtcttgtgacattggcctgggacaatcattgtgggtaggtagttattgatcgtttactagataacccattggttctttgcctcatcctctcatccatgggtcagagttgaattcttatgtctatagacttccaatcagaagtctcactggtggggctgggggtgggggcaggcaggaggcatggatgggaacctgagtaggtagtgtggccaagagatcagcacaacctttgcaggctgacttgctaagtctgacagtgacaaacttgtgagcttactgcagtcagtcacagaggctgttctttttcacacaccccttcatgcccggctttccccatatccacatgcagagggcgagctcataaaactacagggaagcgtgaaatgatggctttggtagctgtttactgggtaaccccactgtgacactgtccttttcatgtgatgtggaaacctacttctgtcctccaaaccatgaaatgtgtcatctagactgcagagtacttgagtgctttgcctcccgatatgccagagcttgtggtccaaagcccattcctgtgtgtccgtcctgccatttagccacagaaggctgcggagtgaggcggcagctagcctggccagtggctgtcccgtggaccgacacctgcgcccccttctgcaagcaggattttctggtgccaacactcattcatcattcccgatcaactaggatgaatttaagactgtgctaccatgtgttctcaagtggtagtttaaaaagtggatttttaaagtgcctttcaattgtctgtgaacgtctaaaggactgatttgtctcattttgactgttgagtctttaatgggtgccatttaaaaaacaaaatgctattttttaattgtcttttttttttaactatcagtgtatctttaaaagtcacccttacggtgattaaattgcactaacattcccaacttattctcatttgtgaaatacatcaatatcagtgtcctgtaagaatcatcctgtgacctagctcgactggctgccgtgtgctgtggctcaaggtctgtgtccatgtaactagcagaggggtgtgtgtgtgaatgctttcagcctccagaaaggtctagctcacacctcactcaaacctatttttgtggttcatggtctcagtaatacattgaaggttcccagagttcaagcgtagtggtcacacgtaacttgagaccgtttcttctcttcataagtgaatcttactaggaattgggagagtggaagaccgattattggtcagggagccaagcctactttacctgaggagaacctgagtaatgccccattgtgaaggagggtgtggatatggagggagtgatgggacatattttttccccctttcatctcacacattaaacatgtccccagccaattttcatagtttcctcatacctcagacaccttaaactcatttttttttctttttgtagagacaggttatctctgttgcccaggctggtctcaaactcctggcctcaagtgatcctcctgcctcagcctcccaaagcactgggattattacaggtgtgagccaccatgcctagcccactctcaattttttttttttttgttttagacagggtctcactctgtcaccaaggctggagtgcagtggtctgatctcagcttactgcagcctctacctcccaggatcaagtgagcctcctgctttagaaccctgagtagctgggactacagctgtgtgtcaccacacctagctaatttttgtggttttttttttgtagagacagggcttccatatgttggctggtctcaagtgatcctcccgcctcggcctcccaaagtgctgagattacaggtgtgagtcaccgcacctggcccaaactcattttttatgttcctgcacacatcattcccttatccaaaccattcattcatccaaatcttgacaacccctcctgaggcaaaagctaacgtgacccatccattcagcacatctctgctgggtttgccaggtctcgtcttcacagtagcccctttgggggtgactgaatagatggagttaagactgtatgggaagtgggtgtgcttattgtcccagctactcaggaggctgaggtgggaggatcacttgagtccaggggttcaaggctagtctgagcaacaaagactgtacacactcctcaattcagaggggacccattttcttgaggtcactaacctagcccctcgccactgagtttatcttggtcctccaatcctctcattttagaattgtgcaggcctctcgggcacagcagtctcatggccagaggcagagccagggctggactggattcttttccaagctgctgtcctttccaagatacctcaagaaaaaaacattaaaagacgaaataactcttgaagggggttatacgtaccatgtaatgctttttccactcacatggtttcaactttgggcttatttgccaaaatctaggatggaaaagtccagttatgaacatgttcctcctggctggatttgatcttgaagacactaaacccaatttcagagcatatttaatcctgggctattgctgaggccgacttagaagagacaaagtgagatgcgaaagaggagaatttttatgatagtttgtacgttacaaatacccaagaaactattttctttacaccattattgccatgactttttgtggacagtttcacataactgtaaagtccaggctgctcgggtctgacccctacagacctgccatgttgaagcccagctttttcgctcccgcacaggtaagaagctgctgatcttctgcagacccgccatgttggggcccagctccccacgccaagtcagaagctgctcatcttctgcaacagggtttggcgccgttcttcagggccgatgccctcagcaatggactttaagaagcgctgctcgtgtgccctctggagcaaggagctgacagaagggttggtcttgctcaaagtctcatagcaggtgagggtttccaaggctaaaacgtagagtggctcacagacctccgggtggagcatggccatgatgtgcagagcatggcagaacacctgggtgtaaacaaacagggcttcctgggtcaggtcctgctctggtccttgaacccaagggccagctgcctgtatcgccctgactgagtccaggaggcgggtcagactgccacagaggagtttgaccacgtggttccagccttccagaggaagccaatcacgacagctatggctgcagagaaactggaaagtcctcaggaagaggacggagagttgcaactcctgggcaaagggcttcaggttgagcaggggaacaaactgaatatattccaggctataagggacatggaggagctgcttctccagcagtctcctggtcagctggtgaaggcgctgccactcctgagggctgcaccaaggcatgacttgcaccagggccaccagaaagcctttgctgaacagtctgacctcctcaggattgcccacgtccaccaccaagagagacagcatcctctccgagatgccgctggagacgcagcagcactccatccaggccaggagccccgtgccagccccgtaccctgggtgggcctgggaggtccactcgtcttctgaaagcttacagatctcaaaaagtgtggctggcacttcacacttgaagtgcccctcgaagaagctcttcagcctcaggcccacagtccagtctagctgttctaacttgcggtggagccaggacagggacttgatccagacatccggggagaaggtctcagcattggctgatacaatctcacacaggagctccaggatatggatcgctagatccttcctatccaaagagaggcaccgcttctccttgggaagctgccagtatttgctgaagcggtccaagagctggcacaagctgaagaggagtggaaacggggagcaggtctggagccagtattcctctcggcacgcgtttgcctctagagtctggatgaagatcctcagactgaggtctacctcttcaacatctaacctcaagaaaggcaggacaaattccttcagcacctcgtctggctcaagaagagcagccactggaatcccttggggtttcacgggactcatcaggcagttcaggagctctaaaaattgcttttcttccttgggtgtagagaacttcatccagacggtttctttgaggcatgacaccatgaaagtggcagatgaattgggaccctgctcttccacaaacctaagggcagggaaggcagtgagaatctgggccaggaacttgtgggtgccgagattgaccacagccaggctgcacattttcttcaccgtgacttccgggtgcactatgaccaggcgggccacggaggccacagcttttgccaagccctgttcggaggcactctgagtgagctggttaaaagttgtattgaggtcttcctgaaaaccctccacataagccagcaacttttcagagaggccctttcgcccccaggaacgcaggatacctgcaaggactttatttttacctggcagggagaggtctgcgtaacattccaggatcaggtggatcacctgccggatctgagactcagggatggctctgtcagctgtgctgacgtctatcactgtttccagcagcctcaacaccaagtctggctgtcggaagagggccctgttactccccaggcaggctacccactcgtccgagaaggcccacttcttctcagaggcaaaaatgtagcacacttccatatggcggtccatcttctgctggatgacggccatggcaatggaagctgtgatatcctccaaggccctgttcttcagcaccgtgctcgttttcctcaggaagtccctgacacactccgccagctcagagaccacctgcctgtcctccttggacaggctggtgcggttcaggtagagcgtcgcgttctggctgaaggaagtcagactgtcgcacagccggtagctgtcgtaacttgtcccctggctgctgcggagcacggcctgcaactcctccccccactcccgcagcaggtggtgcaggaactcgcagcccacgaaaatggtctcactggggagtttggccagcgaggtcaggctgacatcccgttctgcctccttcaccttctctgccagcgcctgctggtggtagggattctgggtgtccgagttccacacagagatcaccgtggccagtttgtccagatacacggttgcagacacctcctgggggtcgtcctctgtcagcgcaaacacagtcagcatgtcagccaggttggccagcgcacagcacttcctccccgggcccaggatccgactctggatctgtgtcagcccgcggagcagcatggccaacaggggcatggtggggcacgcgtctgggtctgacctaagcctctttggaggatgggggaactcatctaaggcaggcaggtacttatgggccattgcactaaactgggagagcagggggtcctgcgggtgacccttgtgcttcatcacctcccaccagacgtccaggaagaaggccacgtcttcggcagaagtgtcaacggtcacatgttccagaaagcgctctagttctgcatggcagatggtggtgggcagggccatcaggagctggataaagagtccagaagcttccagggatttgagcagctcgaagaggatggtgtggttgatggtggggatcatgttgcccaccgagaagaacaggtcttcctgccaccgtgtctctgtgtcggacggggtcacggggtgcggctgcagaaccttggcccagatgatgatcagggctttcttcttccaggcaaagggctgggagtgtgctgcagccgaggagatctcccttaaggcctccacgatgggccgtccaacacgttcccagtcagactttgttaattctgccagtgccttagggtggaacagctgctcggccagcaagaagcctccatgcagaatagtcatttcttcacagatgttcaagggtcctgcacacagacaagccaaataagacagtatagtgaaaatgtttccagatggccactgctgttagtaggctgtcatggtttgagatgacaagggttttaaaggacatcagcggacggggagaagggatgactacaagagccactgcacagctggagtcagaaggacttggccgaggaatccagaatggcttccgagctctccagcctgggaactgggaggccaccaggtgacatcacatacagggaatggaggagaatcagagcaggtgtgaggaaagatgagttcagctttggccatcaaggtacagatgtcctccagcaacggaaatgccaggtggaagttcaggagggaagtaagctgggaaatgtgattctgagaggtatctgcccagaggggatcaccggaaccaagacggtgaatgagatccttcaggaaaagtgtgtgaaaagaaaaagctgggctgctgaggcgagaccctccagcaaaggctgggccagcagaggatgtggggagaggggtttagaaataggaggacagtacaaactacaggggccactgagcatgtaccacaggacatgacagctgagcttctcatgacagatgaagggagcatagccacagggtaatgggcacagagcaatcacacagccacagggtaacaggcacagcagcaatcacacggccacaggataatgggcacagagcaatcacacagccacagggtaatgggcacagagcaatcacacagccacagggtaatgggcacagcagcaatcacacagccacaggataatgggcacagcagcaatcacacagccacagggtaatgggcacagaagcaatcacacggctacaggataatgggcacagagcaatcacacagccacaggataatgggcacagagcaatcacacggccacaggataatgggcacagagcaatcacacggccacagggtaatgggcacagcagcaatcacacggccacagggtaatgggcacagagcaatcacacggccacaggataatgggcacagagcaatcacacggccacaggataatgggcacagagcaatcacacggccacaggataatgggcacagagcaatcacacggccacagggtaatgggcacagagcaatcacacggccacagggtaatgggcacagagcaatcacacggccacaggataatgggcacagagcaatcacacggccacagggtaatgggcacagcagcaatcacacggccacagggtaatgggcacagcagcagtcacacggccacagggtaatgggcacagagcaatcacacggccacagggtaatgggcacagcagcaatcacacggccacaggataatgggcacagcagcaatcacacagccacagggtaatgggcacagaagcaatcacacggctacaggataatgggcacagagcaatcacacagccacaggataatgggcacagagcaatcacacagccacaggataatgggcacagcagcaatcacacagccacaaggtaatgggcacagcagcaatcacacggctacagggtaatgggcacagagcgatcacacggccacaggataatgggcacagagcaatcacacagccacagggtaatgggcacagcagcaatcacgcagccacagggtaacgggcacagcagcagtcacacagccacagggtaatgggcacagagcaatcacatagccacagagcaatgggcacagaaggaatcagacaagccctgccttcactctttataaacttgccttgggaacaggcttcaaacattcttctagctttcagggaaacggtccaccccacagctccttccagtcaaaaacaaggtactcatggccctagctctgtgggagaaaccagggagtagatacagaaaatactgtgctagattaagccttccttcagggaactaacgattgacacagacttaccatggaaaacatcttgggatgtttaatcagacatgggtttaaatcctagttcagccatttaaaaatgatgtgattctggccaggttcagtggctagcacttgtaatcccagctacttggggggctgaggcaggtggatccctgaggccaggagttcaagactagctggggtaacacagtgagactccccctccatctccgaaaaaaaaaaagggatgtgatcttggtcagattgcttctccaagccttccttctgcatatgtggggataatacagacttcatgttatgcctttggggatcatgtgatatataccagtcaagcccttgctagtgggttggcactgctatctcctgaccccatctccccgggacgctatgatggataaatgagatagagctacagtaagaatccagttacagagtctaattaggtgctcagtaaatgttggtttccccaaaccttttcatggttggcaagaccagaatcttgtcactattctttgcctcccccagctcagaaacatcaaaggatgtaggtctttatcaggtatgtttcctttggcccagaaactaaaacgagggtgcaaacactgctccctattcctcattcctgagtcatctcccctttcccaggagtgagagatgctactccttcctcagtctgtcatgcccccaagagctcatattccccattttcacaggccagacaccagcagagaaaacactgactccaggagactaaggaccatcttacccctcccaccatttatgggagcggcagcaggccaagggctcagcactatgtaacccacttgtggaggcaatccatctcatctcacagtggctgagaccgactcccagggagggttacgctgcgaaggggacctccctgggggttaccgcccttctttctggctcaggaggctctcccagggtcccaaaatatagtccctcctgacgctgtaaatttaattttattgcattattggcttagttgagcagatgtttggccctaaacacctgccttccaggcgcattaagtacgcacagtttgaagtagtaagtcccagggcggttactagctggaaaatactccggtactctatcatggatggttaactagtgcttgccacagcccgcttcttaggtttattaagcacctactccatgccagacactgtgctaggtggtacacaggtaagatctcttctattcacaatcaccttttgaggactagtattcctgctctagagataaggacactgaggcgcagaaacgatttgctgagggtgtcccagcctgaatgtggtggggctgggaagcaattacggctgaggggctccaagcccttagagctctgccattccgctcctgaaaagctgtctgggggcggggaccagaccatttccccccagcctactactgctgacacatctcggggtgcctcacccccagctctcccagaacagcctcctggtcttagcagcgtgtgccaagatttagcagggagcatctagttcctatgggctccctcccagaccttgcctgtaagattctgaatccggacgcacgcaggttcacaaagtgatacctcaggagcgcagccgcccccaccgcgggtgtgacccgcgcaaccccacaagggacactgtacctcggcgatctcaatgcaaagtcgcccaaaactcagtggggagacacacttccattctccccgctctgtcgatgaggaaacgtcatgagcgtaagacacttggagcgttaagacacttgctcaagaacgcagctgccgttcaggaaatgaggccgtcggggcgcccaggggtgctcggagggagcccgtttcccaaagcacgtgcgcgagccccgggcgcttccaagggctctaacttcacgtctgctccgtgttttcaagcgcagggggccggaggcggcaagacgcggcccaacgcgcggcgggacccggaccaccccccgccaaggccaccccgggacccctagacccgccccgacgcgggggacgtttcggtccgggcccgcgcgagcgtgcgcgacaggaggagacgcgacggggcagcaccgctctggtggcgcattgctggacgcagcccggggccggggagccgcggcacccacctaggtccatggcggcgacgccggcggctgcgcggggctaacgccccctcccctccgagaactcgaacgcggcgcgggacgcacggcacgatgggagacgcaggagccacggcggccgcgcttaggcctgctcacaacctccgcccggccccgcccacagcctccgccgcgcacgcgcagtcctcacgaacgagcgcgccaagcgcacagcgccgccttccggcagagccctcccaccagccctcaggtacccggacgtcgctcactagacccctccgcaccgtcccctgcccggcccctcttccggggtcccagcgggtcgggctcatgattccccggccccgcattcaccctcacccggtaaccccgggcgtgccccgcacacagttcacccccaccgagcgcctcccccgggacgcccaccacccagcgcggccgcaccacgcgaggcttccactcccacccgcccagctcgcgccacatacagtccctcaacgcgctcctgccgcgccgccccctccagacagcagcgttccggatcctagacgctttttgacggctggtcctccccagaaaatgcgccgtgtgagcccaaacatggtggggtttacgctggaccccgagcttgcaatctgtgcttgacaaaacacaaacatcgcgtgcctgtctcctccccctgagatcgagtagtaacagccactccaactctccacctccagcttctagcaccagggaccgcctccaccaccccatgtgccaagtggagttcgagctgcgcggccctcaagcagctgaagggtcccgtgagcgatcaggagaagctgctggtctacggcttgtacaaacaggccacccagggcgactgcgacatccccggccctccggcctcagacgtgagagccagggccaagtgggaggcttggagcgcgaaaaaaggggcgtccaagatggacgccatgaggggctacgcggccaaagtggaggagctgacgaagaaggaagtggggggcgtggagcgcgaacaaaggggcgtgcaagatggacgccatgaggggctacgcggccaaagtggaggagctgacgaagaaggaagtggggggcgtggagcgcgaacaaaggggcgtccaagatggacgccatgaggggctacgcggccaaagtggaggagctgacgaagaaggaagtggggggcgtggagcgcgaacaaaggggcgtccaagatggacgccatgaggggctacgcggccaaagtggaggagctgacgaagaaggaagtggggggcgtggagcgcgaacaaaggggcgtccaagatggacgccatgaggggctacgcggccagagtgaggagatgaggaagaaggaggctggctgagggctcctcgggaatggaaagggcttcttagaccttgatggctgaaatgtcctgaaactgtcgcaagcttagccgagacatcaataaatcacttaaactgcatgagagtgactgctgttggaaaggagaaactcggtgactgagtgctggggaggcgtccaaatacacagactaactttttgtatggttttgggtggagttcccagctctcctattacaagagcgtatgtaggtatttggaaggacgagggggacagtgtgctgtggaaatgcccaagatctgagggcaggagaccattctccagtgacagcctcttgggaggttgaggccccagccccttatctcttcaaggctgatttactaataccccagcaccacagaggggagagggactctgtcctcctaaacactaaagtcaagtccaaaagcccccactggaacacagggcctacccggttcatgttttgagggagaccaagctttccgtgatgataatgtgatgaaacaattgatgcgccagaacacagcagtttagaaacaatggagcagatggtgtcaaaatcccagccccagaaaggctcacctaaggccgggcaaccaaaatgttcccgggactattctgtacttaaccctggtttctgcttaggggacggtgggacaatatgcatatggatgtctatgtgggatttgttgcaagagcacaacacaccccttgacctatgcaagtgccagagtgtctgagcccagcttctactcctgttaatgatcacaggagcctcatacacaaccattgtgcatggcggctggagtatggagtagtaaatggtatccagaaaggcaggtctacggtggcatatgggatttcctggtacttcttctttaatagaaactatcttcacagatcatgacatcaggtcagctgcagttctcactgggaccaataaacaatagaagcaacaaccataaagacttaagaggacaaaggaaaccaaacctcactgtgtgtcttcaagatctgttcacatagttgcaggaagttgctgtagacaaagtacattactaaagaatgaagcccacccaggacatcacagcaacgaaagaactatttctggtaactgtggaccaggtgagagccacactgtagaacagcagtgctgccctctcttctttggcgaatgttatgaagacattctgatgcacttaggatcatgattcatgttaaatgtaaattaattgtaaaaataatacatcttgctccaaaatgtggtgacaatttagaagctgtccacatagccagaccactctgtaaatcacagaacctagaaagtaaaaatgtgccataattaggacagcagaaagtaacagtaaaataaagttttaaaaaaaaaaacagaaaataaggatttatctatttgtatttgcttaagaagaggttacctataggatgcagggggaatgggattgatgggcatggggtatactgtgaaaggaaaataaaatcttgggaccaaattcactaagcgaaaaggaaaagttaagcttggaaattgagtcatggaatatgcaaaaaacttccttttgttcctaaacagataagctacaagacagaaggccacatatctccccaggtggtctccctcacctgacaatataaattaacagcttatcttcataggtaagggacaaagacaacaccagaaaccatccctcaccagccgagacaaaacatagatgtactgagctgaatgcataactgttcctctgcctgctgctttcactgtaacatatagatttggtgagcagtaaatgtagatttactgagctgaatgcataactgttcctctgcccgctcctttcactgtaacatgtagatttggtgagcgctaaatgtagatttactgagctgaatgcataactgactgttcgtctgcccgctcctttcactgtaacatgtagatttggtgagcactaaatgtagatttactgagctgaatgcataactgagtgttcctctgcccgctcctttcactgtaacatgtagagttggtgagcgctaaatgtagatttactgagctgaatgcaaaactgactgttcctctgcctgctcctttcactgtaacatgtagatttggtgagtgctaaatgtagacttactgagctgaatgcgtaactgttcctctgcccgctcctttcactgtaacatgtagatttggtgagcactaaatgtagatttactgagctgaatgcaaaactgactgttcctctgcctgctcctttcactgtaacatgtagatttggtgagtgctaaatgtagatttactgagctgaatgcaaaactgactgttcctctaccccctcctttcactgtgacatgtagatttggtgagcgctgatcaaagcctaataagaatgtaaccacttatctccctacctaccctcctgtatttttcctttccctcttccctcccttcctgctctttcccttttaaatacttgttaggaataatgctcaaaatcctaaggaaatagaacactcgaacaaaggattcttagcaaagcaattttacttctgtgcagaggggtgcctccttggccagttgtcatgagagcacacctgaacaaaggggcacgagagcctttgttcctgacacaagtcctgcccctctaccctttccccattggccggggtcaggtcgtacaatctaaactaatcgcgcttggctaaacatttgatttttttagatagggtgggcccgtaaaagaaagcggagaggaaggggaaggggtgtctgtaatgagctagaaagttagtcctctttccaaataaggaaaggaatgtgagctggtactgataacgcctggtgctgtggcgtgcctgggcatctcacaaaggcaaaaagggaaaaggagaaaaagggggcggggcgctatgaattaaagaataaaagattgatcagattatttgaagagaaacgtcgtcatatcccacatactgaggccctaaaaatcctctctggaaagtgtgcgggggccacagatctgtggttgtgtctcaggcacatcctcagccttggcaaaataaacctctaaatgggcgagacttgtctcagacacttacccggtttacaataccttttcatattgttttcatttttgaaccatgtggctctattgctttatataaagaggatgaggcaagggcacttctttattatcattgaagtcagagtaaatttactattgatttcccctgaggttggggtaagaactcttagaacaaacagggaaacttctcaactcttaccctgaatttcaacggacacgttggaggtctcctgaaaactctggctgctaagtcacagcggcactgagtggcaggtgagagagccagaaagccacatgaaggagcactcaccgtccctaggtttgttaattccggtaacatgtcagacggacacggacttcagacagtcctgcaggctaactaggagagctctggcaacacggccgttctaagtcttcccggagatttaactcaaggcacacttgtatttacatgtaggctccacaaccccttgattcaaaaaaacaactctggagaagctgaagaactttccaacttcatctgtttgaaacaacagcttgcagcctgaacaacgcagtgagacggtcgctacaaaagatcaaaacgttggctgggtgtggtggcacgtggctgtgggcccagccattcgggaggctgaggtgggaggatctcttgagccccagaggtcaaggctgcagaaagccacgatggtgccccactgcactccaccctgcgtgatagagcaatgtctcaaaaaccaaaaatgaaacaccagcttgggcaaagctatcttcctcatgccattttctaattgatcatatcccccagatgtgggaaactaatcacttttgtttaaaattagtttttgcggatctaatgggcgtctaaataatttttttttttttgagacggagtttcgctcttggtgcccagctggagtgcgacagcgtgatctcgcttcaccgcgacctccgcctcccaggttcaagggattctcctgccttggcctcctgagtagctgggattacaggcaggtaccaccacacccatctaattttgtatttttagtagagatggggtttctccgtgttggtcaggctggtctcgagctcccgacctcaggtgatccgcctgcctcagcctcccaacgtgctggcattataggcttgagccgccgcgcccggcctaaataataatttttaaaaattactcttttttggtttagaattacttagctgaactgtgcagaagcaagcttctggatgccttgataaaaagccaaagttgtacactagagggctttaggatgaataaaatgttaaaaaacgccaacaggacgaggtggctgatcacctgaggtcagaagttcaagaccagcctgaccaacatggagaaaacccgtctctactaaaaatacaaaattagccatgtgtggtggcacatgcctgtaatcccagctacttgggaggctgaggcaggagaatcgctcaaactcgggaggcagaggttgcggtgagccgaggttgcgccattgcactccagcctgggcaacaagagtgaaactccgtcttaaaaaaaaacaaaaacaaaagcaaaaacaaaacgcaacaaagcgagacatgacaggcaatgaaataaataaaaggaggcagatctcctaaagccaaaatgtcctatgcagacaaacagcattactgttcaccctgcatggtgcccactatcatgcacagttgtatatttaggagaaaaacgttttggtacgccaaaatacaagataagcagataaaagggaaacctgtgtgtgttatttagttattcggtacttatataaaccacttattttactacaacaaacttcgagggccacattatagcagcccaatacactgggaaaaggagtttcttttcacaaggacaatattactagagatgaacattaaaaattacttaataatctaatagaaaattggaaaattaacatacattctaaagagaagcagaagtttacctggttattcaaagttcatataataatttccacatgtataaaaaaaaagagaagggcacggtggctcacacctgtaatcccaggctgaggcaggtggatcacctgaggtcgggagttcgagaccaacctaaccaacacggagaaagcccatctctactaaaaatacaaaattagccagacgtggtggcgcatgcctgtaatcccagctacttgggaggctgaggcaggagaatcgcttgaaaccgggaggcggaggttgcagtgagccaagatcacgccattgcactccagcctgggcaacaagagcgaaactctgtctcaaaaaaaaaaaataaaaaataaaaagaaccaattacctagaggagggccatatatataacttggtttgctttgaaactcaagactgcttccctaggatatggaattcaagctgaatgaaaagttgtagagctggatgagaatttatttctctccgtgaaggtataatagcatcacccctataagaagataagctcaaatacaaccaaaatttcgatgccctacgccctgccagtaagggaggaaagcagaggttacgatttacaagtaattctctatgtgttctttgggaaccaggatcctctgagtcaatcccttccaatctcctaagtttatttttaaaaatctgaacctggccaccactttacatgatgagacttagagactggtatcacagcttgatttcagaagcttactttcaaaaaaaatttattcaatgaatacacaatataattccatttcgagtgattaaaacctatttgttgtttagaaccaaacaaaactacaagaaaacattttcaaaaccttttttttcaggctgaagaaatcgtttaatccattttaaagaaatctcacatgatgttctgtcgggattaaaaatatacacggaaaaaaataaaacaaaatatatacacagaaagaagctcgcacagagtcaggcgtgcagcaacgtcacacactcattcctttctgtttcctctggacactcaaaatgtgaaagcaagtaagaggggggtggttaaccaaaccttttggtccaaggaataaaatttctttaaaaaatttaaaacgtcaaaacctgccagaataagacaatagaagagcgtatcgtcaggcgctgggaatggcaccacgacaaggcattaatgtggattcacttgcacagctgctctcataaaagctacacgattcagaggtaaccctaactatccgcaatcccaaccaaagtcatgttcatgccgctgtcctagtctggacaatcatctgtcactcatccaacacagttatatacagaatgcgcagtcccagcaacagtgtagattacagcaggcgttctctacctggactcatgattggatttcatttctaaattacatcagagctttcaaagattgaaatacacaaatctgcactacccaagcctccttgcctgtacgggaaacaaatcagaagagcatttattgggaactgacacgtcaggcctcacaggtgctgggcaggaatcacagaggcttgctctgcatcatgtcttccgttaacctgaagctttgggtttattgtgtttggcaaaccactcgtcacttttatctgctgccattgcctgtaaaatagaaatagaatatacactgactccaagcctgaaaaacaaaagacatagcccactttatatctcactgtactgaccacaataaaaaaaattaacattaaaaaaaggacccaaacccccgctccaaaaaaaagagaagagaaataaaaaaaattttttaacatttaaagagtattaatccagtacagagtgttatgttcaataaggcaagagatactggtgataatgagcaactgtggatcctcactcggcagagtcaagggcaaaccaagcctgtagccaggaagtgtggctggcggaccaacgaggtcagggacccgcatgccaggcggtaggatctctggtaaaagagcaagtcctgccactcacagcatctgggcagacgctcaagaatctttagtgtcatgaaactcagtctgatagtgaggccaaatatgaaactctacgtgatgttttagtgatgaagcctggaatgattcctttttcgtaagtctcctcccggcctactcttctgatgttggttctgtttagtttgggcatcttaattaaaaaggaagccttaagccgtgcccagtggtcacacctatagtcacagccacttggaggctgaggccagaggatcacgtgagctcaggaattcgagttcagcctgtgtaacagagtgggaccccgtctcatatacatacatacagatacaaataaaaataaatgaataatacaaagccttaacaataatgttttggttccacaagcatccctttcgttgtttagtaaggacaaacactcatttatgtagtcaaaaagagccaggtaccacgctgggttcagatgtggcagcagagacagtcggaagctttgaggagtgtgcagaacagctgagaactcagatatggaaacaagtattttgcatgacagagtgtgtgtacgcatgtgtgtgtcttgaagcatttgctataatatctacctcagcaggaagtcacaagatgaggtggcaattgaaaaagaagaaacaaatatatttattatttagaaacagtgaaggtgaaagtggctgtcctaggtagtgtgactcagagttggaccgtttcatttctaaaaaatcttagtactatctgatttattatcttgatgaaaataagaatttaaaaatcaaagatatgcttaaaaaaaccacaagtcacaaatatgcacgtttctgtcttttaggagccataaaaagtgggaggaaagaacaactaaattatttggagaacctaagaaagctttttttcttttttgaaatggagttttgctcttgtcgcccaggctggagtgcaacggcgccatctcggctcactgcaacctctgccttctgggttcaagtgattctcctgcctcagcctcccaagtagctgggattacaggcgtacaccaccgtgcctggctaattttttgtgtttagtagagacagggtttcaccatgttggtcaggctggtctgggactcctgacctcaggtgagccacccgccttggtcccccaaggtgctgggattacaggggtgagccatcgcgcccggctgaacctaagaaagcttttaagtgttgaaggacaagtaaaagaggagagggaaaaaaccctttgggttggatgcaagaagaagtatcttagctaatataaccagttcagtgggactggaatagggatgagttaggggacttagggaggcaggtgggaaagaaggtcagagggtagagaatgtccaaaaatgtcacatgctctgtcagagagtttgaaatttatctcagaggcaagagagagctatcggattaaacggttttaaaaattactggctgtttgctttgggacagaccgtaagttgacaatgaggcctttcaaagggaaagctgataggcagaagacatttcagaggtagaactcacagctcttggtgactaatagctaaaataatttaaggatgaggagaaataatggtcaaaagtgactgtctgtaaatctaaaacgactattaaatgttaaaaaacaaaacacaacaaaataacaccaaaactggctctgaggattccagcgtgaacaactgggatcacagacacgctgtactgtccagggagggagcagggcgcagaggaagaaaaaggactaactgtaaagcctgaaaggcttccatccaggccccggcctgcacctactcagtgcgtgatcttcagggatgaaggggaataatttcatcaccatccaggccccggccggcacctactcagtgcgtgatcttcagggatgaaggggaataatttcatcaccatccaggccccggccggcacctactcagtgcgtgatcttcagggatgaaggggaataattatttcatcaccatccaggcccctgcctgcacctactcagtgtgtgatcttcagggatgaaggggaataatttcatcaccatccaggccccggcctgcacctactcagtgcgtgatcttcagggatgaaggggaataatttcatcaccatccaggcccctgcctgccacttactcagtgtatggtattcaagggtgagggccaatgacttactcattcttagcctcggtttcctcatttgcaaaggctgatgctatcaaccttgcaggttatattaagaatcagagaatgtggctgggcgcggtggctcacgcctgtaatcccaacactttgggaggccgaggcaggcggatcacgaggtcaggagatcgagaccatcctggctaacacggtgaaaccccgtctctactaaaaatacaaaaaaattagccaggtgtggtggtgggcgcctgtagtcccagctactcgggaggctgaggctgaggcaggagaatggtgtgaacccgggaggcggagcttgccgtgagccgagatcacgccactgcactccagcctgggcgacagagcgagactccgtctaaaaaaaaaaaaaaaaaatcagagaatgtatatgaagcacttaaggttggatgcggtggctcacatctgtaatcccagcactttgggaggctgaggcaggtggatcacctgaggtcaagagttcgagaccagcctagccaaaatggtgaaaccctgtctctactaaaaatacaaaaattagctggacatggtggcgggtgcctgtaatcccagctactcgggaatcccagctactctcctgaggcaggagaatcacttgaacctgggaggcggaggctgcagtgagctgagatcacaccactgcactctagcctgggcaacagagtgaggctccatctcaaaaaataaataaataaataaaaataaagcacttaagaacgtaccgatatagtagcatttatttctttttatttttatttatttacatatttttagtataaatagagagttcatctgggccaagcttgaagactgcagcccgggaacatagattcaggtttcccagaatctacactcccaagtagcctttatgtaatattactggaagaagaatggatttgaggtaagataagttatggacacgctgagtctgatatgtggtaggtttcctaggtgaagaggttctcaggatataacatcggtctggacagagaaagtgctacatgtaagagaaaaagttcataagctggacttcaccaaaataaaaaattcctcatcttcaaaaactcaattaatggctgggaaaaatacttgaatttgcaagtgacgaaggaatgatgaaaaactacagtacagagtcaaggtaagagtcacgtaaggctctgtcgtactctcttcggttgtgcatatttggaattttcatcatgaaatattaaaaattattaaagaatggacaaaagacttgaacataaaattcacaaaaataagtaaatggctaataagcacatgagaaggtgctcaatatcattagtcatcagggaaataaaaattaaacctctgtggggccgagctggaaggatcactggaggccagcctgggcaacacagtgagaatctgtctctacaaacataaaaaacatcagctgggcatagtgctgcagccctagctatgtggtggctgaggcagaaggatcgcttgattgcaccaatgaaaccatttcgcatgtgctagaatagctaaaaaacccacaaaaagcaaaataagtgttggtgagaatgtagacctactggacctctcgtggacaaacgatggtccgatcactttcgatgactgtttgacactttcttatacagtaaaagcagttctactcctaggtatttactcaagagaaatgaaacatctatctacaagaagatttacactagaatgttcatggcagtcttccttataatagattaaaaaatctagaaataaaccaaatgtccaccattataagaatgaatgagcaaattgttatattcataaaattgagtatcagtcagcaattaaaaaaaaaagagctgtgatatgcaattacatggtggaatctcaaaaccatgttgagtaggccgggcgcggtggctcacacctgtaatcccagccctttgggaggccaaggtgggtggatcacaaggtcaggagatcgagaccatcctggctaacacggtgaaacccgtctctactaaaaatacaaaaaattagccgggcgaggtggcaggtgcctgtagtcccagctactcggtaggctgaggcaggagaatggcgtgaacccgggaggcggagcttgcagtgagcagagattgtaccactgcactccagcctgggtgacagagcgagactccgtctcaaaaaaaaacaaaaaacaaaaaacaaaaaaagccatggtgagtaaaagcagccaggcacaaaaggaaagaaaatactgaatgactccatttgtatgaagtccaagaacgaactcacctacagtgacagaagtcagaatagcagctgatctgggagatgaaggtgccaactcactggagatgggcatgagggaacttcctgggaaaatggtctgtattctgagtagtggttgtatgagtaaacacaaccgtcaaaacacatttaaattctacctaaattatgcctcatcaacaacaaccacctgtctgagctgaggaaggagttaaaaactggaagtgaggaggctggagccaggatgatggttacgttcagggcagaggtaaggagaggtcgcaggtaagctctcatcagagtggaggaagaatgcagaatgggaaaaacagcaaagtagggctatgggtataaaaacactttgggatgagacacagaaagaggtgcccgtgtctgaggagaaactgtcaggaagatgaaaatggtaggatggccaggcgcagtggctcacgcctataatcccagccctttgggaggccgaggagggtggatcacctgaggtcaggagttcaagagacagggtttcaccgtgttagccaggatggtctcgatctcctgaccttgtgatccgcccgcctcggcctcccaaagggctggggttacaggtgtgagccaccgcacccggcctactcaaccagcctgaccaacatggtgaaaccccatctctactaaaaatacaaaaattagccaggtgtggtggtgcgtgcctgtaatcccagctaccagctactcaggaggctgaggcaagagaactgcttgaacctgggaggcagaggttgcagtgacctgagatcgcgccactgcactccagcctgggcaagagagtgagactcccaactcaaaaaaaagaaaaatggcaggatcgctaacagcagaggagaagagagctcagggagcaggagttcatcaatggttcacatctataatcccagcactttgggaggccaagatggatcgaatgattgagcccaggaagtttgaaaccagcctgggcaacatggtgaaaccccatctctagaaaaaatacaaaaattagccaggcatggtggcgcacgcctatggttccagctactagggaggctgaggtgggaggatcactggaacataggaggcggaggttgcagtgagctgagatcatgccactgcactccagcctcggtgacagagagagaccccgtcttaaaaaaaaaaaaatgggcccaggcgtggtggctcacgcctgtaatcccagcactttgggaggccaaggcagacggatcgcctgaagttaggagttcaagaccatcctggccaacatggtgaagccccgtctctactaaaaatacaaaaattagccaggcgtggtggcacgtgcctgtaatcccagctacttgggaggctgaggcaggagaatcgcttgatcccgggaggtggaggttgcagtgagccaagattatgccactgcactccagcctagttgacagagcaagaatccgtctcaaaaaataaataaaataaaatgggccaggcacagtggctcacacctgtaatcccagcactttaggaggatgaggtgggtagatcacttgaggctaggagtttgagaccagcctggccaacctggcaaaaccctgtctctactaaaaatacaaaaattagccagcatggtggcaagtgcctgtagttccagctccttgggaggccgaggcagaagaatcgcttgaccctgggaggcgaaggttgcagtgaggcaagattgcaccattgcactccaccctgggcgacagagctagactccatctcaaaaaatttaattcagtaattaatttaattaaattaagagcgaggaggaagagtctggcaaatttgtcagctgagaggatgacagattctactttccttcaggataaaatgtataaagactgtattttctatacattgcctgctttaacgttaattgtgcatctactattatgtcagtaatttgccaagctctataaaccataacaatcttatgagatagatcctcttattttctgaaatttttggataagaagactaaagttcaaagaatttaagtcaactgtttaaggtcagtcacagagttacgtgacagaaccaagaaagaccaatttgttcctttaatcattcaacaaagtatttgcagaacgtctagtacatgccaggtatgtgctaggagctaggatccaacaactactttgaatgcttctgaattactgagtttgatgagaatctaaaagtagttgctatatttggcaagaaacaaaagcacttcactgagtaacaagagccagtgcaaaacagactgaagtgaaaatgggaggcgagaaagagaaacagtgcacactcagatttttagaagaagaaatctggagaggacgtaagagggagaaacagcgcgcactcagatttttagagaagaaatctggagaggacgtaagagagagaaacagcgcacactcagatttttagaagaagaaatctagagaggacgtgagagagagaaacagcacgcactcagatttttagaagaagaaatctggagaggacgtgagagagagaaacagcgcgcattcagatttttagaagaagaaatctggagaggacgtaagagagggaaacagcgcgcactcagatttttagaagaaatctggagaggatgtgagagagagaaacagcgcgcactcagatttttagaagaaatctggagagtatgtgagagagaaacagcgcgcactcagatttttagaagaagaaatctggagaggacgtaagagagagaaacagcgcgcactcagatttttagaaaaaatctggagaggacgtaagagagagaaacagcgcgcactcagatttttagaagaaatctggagaggacgtgagagagagaaacagcgcgcactcagatttttagaagaagaaatctggagaggacgtgagagagagaaacagcgcgcactcagatttttagaagaagaaatctggagaggatgtgtgagagagaaacagcgtgcactcagatttttagaagaaatctggagaggacgtgagagagagaaacggcgcacactcagatttttagaagaagaaatctggagaggatgtgtgagagagaaacagcgcgcactcagatttttagaagaaatctggagaggatgtgagagagagaaacagggcgcactcagatttttagaagaagaaatctgaagaggacgtgagagagagaaacagcgcgcactcagatttttagaagaagaaatctggagaggacgtaagagagagaaacagcgcgcgctcagatttttagaagaaatctggagaggacataagagggagaaacagcgcgcactcagatttttagaagaaatctggagaggacgtgagagagagaaacagcgcgcactcagatttttagaagaaatctggagaggacgtgagagagagaaacagcgcgcactcagatttttagaagaagaagtctggagaggacgtgagagagagaaacagcgcgcactcagatttttagaagaagaaatctggagaggacgtgagagggagaaacagcgcgcactcagatttttagaggaagaaatctggagaggacgtgagagagagaaacagcgcgcactcagatttttagaagaaatctggagaggatgtgagagagagaaacagcgcgcactcagatttttagaagaagaaatctggagaggacgtgagagagagaaacagcgcgcactcagatttttagaagaaatctggagaggatgtgagagagagaaacagcgcgcactcagatttttagaagaagaaatctggagaggatgtgagagagagaaacagtgcgcactcagatttttagaaggagaaatctggagaggagatatggggtcagtaaaaggtttttaaaggatgggagctttcagcgcctgtttgcacgctggcgagaataactcactggaaagaagagactgatgctgcagaatggagaagagatgatcaaaggagctgcagagctgaggggatcagatggaggcatctccctggggagagctgaggggaacggatggaggcatctccatggggagagctgagggggtcagatggaggcatctccacggggagagctgaggggatgggatggaggcatctccatggggagagctgaggggaacggatggaggcatctccatggcaagagctgaggggatgggatggaggcatctccatgcggagagctgaggggaacggatggaggcatctccatggggagagctgagggggtcggatggaggcatctccctggcgagagctgaggggaacggatagaggcatctccatggggagagctgagggggtcagatggaggcatctccatgcagagagctgagggggtcggatggaggcatctccatggggagagctgagggggtcggatggaggcatctccatggggagagctgagggggtcggatagaggcatctccatgtggagagcagaataagcacagatccaccagcagtggttccagggcagcctgaggttgtggtaaggcacaaatgctaagtctagacaagcagtctacacaggtggcagtgaagacatcggtccttggctgaggtcaacccaacagcgaaaggacgtggttctgacattaagaacctggaccctgttgcttagtctcctcccacacacacttaatgccatccctctcaggcccatggtgacataaatgtagaaatgggactcacatcatccaacaatttgcttccctctggatccatcttagaaagttctcgaaatgcttcatccccgacaaagcaaatttcatgtccgtcctacaccaataaagagaaaagacacctgccaaagacatccttgaagaaacccctggtccagcctgccccctgcctgagaaatacttacagggtcggccagaatgaccacctgtactgttgctttccctggggtgtccaggctcaccaggggagtcagaatcttctggttctcccttttcatcaagtcttctaagtctggcaacttgaggaaaacagaggcaacgtgagccaggggtcacacactactcaggacacggccctcgtcagtcctagaggagtatcagataccataaagaaccaaggcgccatttgtttgaatttattatctcagctgctcttgaaacaactgctgaacttgatactaaagccacaatcaaaaaggacctcaagaagggaaggacaaagttcttagctgggttgaactagctagtcagaaagctcaaacgatctggtatcaagcgttacctctttctgggggcaagagaaggcaattcttccaaaagctgctgcatggtccaccccacccttgacgccctgtagctccagcttacactgaaataggaaagggggttattttttggaacaggttatacattcattacacgtatgtggtagaaaaattcaaatattatatactaaaggaataaagtaaaaactgagtctctatcctactctcaccccagagacaactagtccacactttcctgtgtatccttctagaagcactgcacgcatctatgtttttttttttacacaaatggtggtataatttacaaattattctgttccttgtttttctccacttaatgttaccatgtcaatacataaagatttgcctcaatctttttgctagcgacatagtaatccattccatgaatgagccgtaaattactgaaatatgtctctaatctataggacactgaaattcttacacattgtgattacagacaatgctgcagcagataaccttgcacacacttctttgtgccgatgtatgttgagcacatctgtaaaataattcctaggagtagaattgcagggtcaaagtgcaaggactaaatcgtgctcaaacgctgggttattagaaaaagaagatgaaaaagatcttgcattaaatccattcaatctcttggattaagcaattccacttctgaagagatatatccccaaatataaacaaggtaatatctgggtggtaaggttatcacttattttcttctgtttatctatataaatattgaatcactgtgaagaaactatgggaacaaccttcatgttaacttcatttataaaggttataagccatttataagcttcgtttacaagccaaattcaaagtaacaggttattcttctccaagattgctcacctggttatcagcatagcccagcaaagccctttgcttttcttcatctttttcataaattttcattcccagtagattacaccagtagttcaaggacttttgaagatcagacactgctagagttacttttaatacaggatctgttgggtaataaagcaggaatagacagatcaatttaatagaataaaatagaaagaccaaaacatgcgcatgtatacttacaaattcagtttatgataagaaagggattttaagccagtatgaagctgggtgcagcggcccatgcctgtaatgccagcactttgggagactgaggtaggaggattgcgtgagcctaggaattcaagaccaatgcaggtaaaacactgagaccttgcctgtatgaaaactttaaaaaaattggctgggtgtggtggctgatgcctgtaatcccagcactttgggaggccaaggcaagtggattacctgaggtcaggagtttgagaccagcctggccaacatggcaaaaccctgtctctactaaaaataaaaaataaaaaaaattagctgggcgtggtggcgcacgcctgtaatcccagctactcgggaggctgagacaggagaattgcttgaacctgggaggcggaggttgcagtgagccgagatggcgccgttgcactctagcctgggagacaagagcaaaactctgtctcaaaaaaaaaaaaaaaaaaaaaaaagattagacaggcgtggtggctcatgtgtgtattcccagccacttcagagatggaagcaggaggatcgcttgagcccgggaggttgaggctgcagtgagccaagactgcactactgcactccagcctgggtgacagtgagaccctatctcgaaaaaaaaaaaaaaaaaaaaaacaaagacagtatgaaaagcctcattattcaatggacggcgctaagaagactggctaatcatttggtaagaaaaacttacatcttcgaaataaatgacaaaatacattcctgatgggttaaaaaaataagtttagagaatgaaaccatgaaaatactagatacagatgattatttatacaattttggagtagaggaagatttttctttaaacctgacaccaaagatagaaaaactatgaagaaaaaacttctgctacataaattacacaaaatggaaaactcctagacaacaaccaagaaaaggaattacaatcaaaactagagtatacaacacagtagggggaacaactgcaatatattggacaaaaagtccttaatatgtaaatcacctgtaaatatcaataggaaaagaatgaacatgctagaaaaataggcaaaaggcacaaagcaataatccacaaaacaaggaattagaatggtcaaataacatacgaaaaaatattcaggccgggcgcggtggctcacgcctgtaatcccagcactttgggaggctgaggtggcaggatcatgaggtcaggagatagagaccatcctggctaacacggtgaaaccccgtctctactaaaaatacaaaaaattagccgggcgtgctggcgggcgcctgtggtcccagctactcaggaggctgaggcaggagaatggcgtgaacccgggaggcggagcttgcagtgagcccagagcgcgccactgcactctagcctgggcgacagagcgagactctgtctcaaaaaaaaaaaaaaaatttcaacccgacgcccccaaacaacaaagaaattagaattcacataaaatcctttgttaactaatgtgcaaataatgttaaaagttggcagtgttaactgtgttagtgtagaggggaaaatcacaatcatgtaatacaagtgtaaatcagtacatttctgggcaatagtttgatggaatgtaccaaaagctttaaaaagtgctcattgcttttgaaagaacaagtccattttcagccactccaaaggtaattgtggatgtatgaagggcttttacgacaaagacattcaccagtgttgcttagaacaataaaacactaggaacgacataaatatccaacaatagagaattgtttctcttcctacaatgtaataatacgatggaactcctaaaaaaggatatacagaaatgtatacacttaattatatatacgtatttttgacaaaagattggaaagatatactctaaaatgtcagcagtggttctctctgggtacatgggtgtgtgtgttttttttcagcttctctgcttgtctaaggaaaaaacttgattattttgtaaaaagaataaaagtcatattgaaacacctactgttactggaaacttttcacattgtaaagtgactttctaaagagctgttccacgtctccatctgactacgataaattcagtacatttttctttggctttactgccttagtcctgtttgctagaacagcaatattgggattaagacgctgtttctcacaagtgcctccgcctggcaggctccatttttttctttccatttacttcaaaatcaacaaatcccagttgacttggagcctgaagggacgcaggacaggaagttaacgcgtgggtgaagctgcacagaagtgggtaattcaaaggaaagatgaatgccagccggacagaaggtctgaccacattgtcaaccagaaatgcccaaggggatttccattccaaagaacaaaagcttcttagcaccatggggctctctattattttaagcactgaaatatcactaaggctggagagaaaaaatggatggtggagctagctgcaagcgttaagttttaaagtcagcaaaggatcaatcacctatcaacaaaaaaacaccatcaacaccctttaaatcaccagtgaggcagagaaacaccatctctccacgagtcccacacagccaagtctagcctcccacactggaacagacggatctttcttttgctgagcaccggatgataaacaaggagcactgaacattctacagactcagcatgggggcatcggggacaggaggccgaccagtgaagaaggagaatttccaggactcccttctcaggcccacttgcaggcatacgttcaccaagtaagggagtcggcacaagtgcccttgccattcgccagcattttccccgtttttgcttttgttttgtcagagcaggtagctgaatttgcaggcattaaatacaaaatgaaacactgatgaggctgcctctgcagtcaacaaaacaaaccctgcaaagtttccttcttgttctgtgtggcagtcagcgtgggggctcctcacttccatgccatccctgagtacccacgctcaagtctgggaaactgacctcggctccagaggaggcatggctaaatggtttgggggtgatcctatttctcttgccagtgattggtttaggagcaggcacagtatatcaaatctgaacaggaagtttgctggaagattctaggaaagtttttcttctgctcctaaaaagaaagcaaaaagggccgggcacggtggttcacgcctgtcaccccagcactttgggaggctgaggcaggcggatcaagtgaggtcagaagttcaagaccagcctggacaatatagtgaaaccctgtctctactaaaaatacaaaaatgagctgggcgtggtggcatgtgcctgtaatctcagctactggagaggctgaggcaggagaatcacttgaacctgggaggcggaggttgcaagtgagccgagattgcagcactgcactctagcctgggcgacagagcaagactccgtctcaaaaaacaaataatttttaaaagttaataaaaatactaaaaaaaaaaaaaaaaaagctgagcgtggtggcaggcgcctataatcccagctacttgggaggctgaggaaggagaattgcttgaacccgggaggcagaggttgcagtgagcagagatcatgccagtacactccagccggactgacagagtctcaaaaaaaaaaagcaaaaagaagtcagcatctcctctcctaccagatgggattgtgggagcatgtggccccacctgctcctggcagctctcctgcaaccttgaggggactagttctaggagaggtacccgcagagaacaacagaacgtagaaagagaaaatgtggggagctggtgaatcatctaaccttgaaatctttcccacctatagaatgcctgctctgtgagctaaaagattctataactgttcaaagtagttgggttttctgttatttacagatgaaagaatcataaatcactacattaccagtagaacagaactagtctagatcccctactgctatgtatttaagttctgatatgagaatgtagtctctccgataacaggtaaaagcactggctggggaagacacgtcacgtgaacacagactctacaaaaaaaagacaggcagccctcactctcctttcaccaaagatgcctttagacagaggcttttactggttctggtataattacctgactgaggcagactgcgattctgcaaatagaacttatatcctcccggggcctcggtttcaaaaacaccttctgcaacttccgtcagtggccactccagcttcctggcgttgctgacagcctggctagaagcgagcgtgattccctacaacaaacaacagtacatccaagtacatgatcacaacagatattttacagaacaagacaatgagcccaacccctattgcctactgcctttaggtaaaatcacctaagatttaactggcatccaacattttcttctagtgatttaaaaacaggttttcaatgttttatcccacaaacattcagacctttgtgaataataggacagaaattgaaatgccagtgaagtctgattcatttaacaccaaagataacgtcttctaattctaaagatctagccacagaaatcttgatgttacctgggtctgccagctagctacctatttaaggtgacctgttcttgcttttttaacaaacaaaacaaaaataagcaaactatcaaggtttccttacatttaatcaaagtgcctagaaatgtacacgtgtgctttgagaagaccagccttgtttctggctcggtttattataatggcctctctgcctccagtcttgtaaatccattacccactctgcagccaaagtaaactttccaaaacgcatcctatagtccacccccagactgcagccagccttgttttccctttgctcaaagtccgccaatggctcatttcactcggtgacttacggcctaggaggccccctgcagtcttaccccatggcactgccgaccccatctcttaccacgctcccctctcgttctctattccagccacactggcttccttacacctcctcgaacacgccagatgttacctgacggctcttgccagaatattctctgcctggaacgcgcatcccccagatatccacgtggctaactccctgacctcttttgagtctctgctcaaatgttatctcttcactcacacacacccttggcactctactcaaatttacaaccagccacctacccccagccaaaactctgctagaaaaaaacggtatttaccataaagtcattgccaagcttgtagtctccgacgccataattgtaagtcagttctgcgacaaaatgatcatcctcaggcccaaatcccaccattgttttactccatttcccatcataaggcctagaaaataaaagtaaatgaactcagtgactacagacaagtcagcctcaggccacccccagagaactactgggcacagagagatgagcattcctgtctggtcctaaaagttctcttaaggatgagatgacctcagatggtacagaaagcagctgtgggcagtgctcatgggaccctactacaagctccaaagactatccagcatctacctgaaggaaagatttgttcaccttttctgtaaagcaaggaacagaatcctaaagacagttctccaactgacctgttatttccttgactatcaatcaacaagcatgaaattcctaataggccttggactgttccaacttgtcacggtactaagcttaagagatggacgggcgtggtggctcaggcctgtaatcccagcactttgggaggccgaggcgggaggatcacctgaggtcaggagttcgagaccagcctggccaacatggtgaaaccccgtctctactaaaaatacaaaaattagctgggcatggtggcacatgcccatagtcccacgtactagggaggctgagggaggagaattgcttgaactcagaagacagaggttgcagtgagccaggataatgaccccgcactcccacctgggtgacaaagtgagattctgtctcaaaaaaaaaaagatactggaaagccgctgcttcatctagagcatgtacttatttgcatttgtggcataatatgaaacatatctggtcattgtccctggttcctgtctcagagctcccaaaacctctggaatttcctgataggaatatcttttgttatattcataatgagcccctttcagtcacacctgagtttatgctaatgaagtgacttagagtggggcctctacatagactcaggatggggctggtcaccagaaagacaaatgattagaggactgaactttcagtcccatccaccaacctctgggaaggaaagggatggagactgggctctattaggcttgaacaatgagactcatgagcttctgggatgctgaacgtagggaggtgctggattggagcctgcccagaagagcatggaagctctgccacccactccccatgccctgccctgtgtatctcctctgtccagccatttctgactcgtactctttatgataaaccagtaaatgtaagtaagtgtttccagcgtttcccttagttccatgagccactgtagcagactatcaaacccaaggaagcaggagcgggagccctgacttgtagttggtcatcggaaatcctgaagatccagactgtgaccggcgcctgacgtggcggaaaatcttctgggactgagcccttaacttgcaggatctgacattaactccaggtagagtcagaatcaattaaataacaggacagccggctggtgttagagagctggagaatccctttgtgtcccacaggtgttgtatgagagtgcagagaaatgtgttcccgacgctcctgaagttgcctccctaatttactgccttcttaattaattccactgctttatactcatgagagtgcagagaaacagtatgtgttcccgacgctcctgaagttgcctccctaatttactgcctccttaattaattccactgctttatactcactttgagaaactgtcttctgttatccgggtgtagtcagagcctaaaggagattttaagaaacaaggtatcatacccattacaggcagctttgcagccttcttcaaattcctcatgccgcagaacctggtgtgagatttagaataaattgtgaagtgttgctagtactgctcacagcgtctttagcacagactaaaatgtcaaaacacaaacattatcatttataagctttacttgtaaaagaacaaaagcaaatgagctttacacttctcccaggatagaagcagtggaaggacgaacagcttgacaccaagggtcaggctaccaaatcagttgtgaaatctatttagattggtaagcagtgctatgcagtgggaaaaagtgtggccttcagcattaaagaagtctgatttgggccgggcacagtgactcacgcctataataccagcactttgggagatcaaggtgggtggactgcctgaggtcaggagttcaagatcaacctggcaaacatagtgaaaccccgtctcaactaaaaatacaaaaattagccaggcgtggtggcgtgtgcttgtgatcccagctactcaggaggttgaggcaggagaatcacttggaccatgagatggaggttgcagtgagccgagatcgtgcccctgcactacagcctgggtgacaagagcaaaattccatctcaaattaaaaaaaaaaaaaaaaaaaaaaaaaaaaagatgggcatcgtggctcacgcctgtaatcccagcactttgggaggctgaggtgggcagatcacctgaggtcgggagttcgagaccagcctagccaacacagtgaaaccccatctctactaaaaatataaaaaatacaaaattagccaggcatggtggtgggcgcttgtaatcccagctactcaggaggctgaggtaggagaattgcttgaacacgggaggcagaggttgcaatgagctgagattgcaccattacactccagcctgggtgacaagagcaaaactcaaactcaaaaaaaaaaaaaagtctgatttggaattctgtcatttagtagttgtgtaactctgagcaaattagaatctgagtctcagtctcctaacatgtgatgggaatggatgttatgaaagcatctcacagaaccctgcacacagcgggctctcaacgtgttagctttagccctcctttttgattcccacggctcctgccagttgaagttcccaacgcttcgctcagactattaaaaatcatccttattggccgggcgcggtggctcacgcctgtaatcccagcactttgggaggccgaggtgggtggatcatgaggtcaggagatcgagaccatcctggctaacacagtaaaaccccatctctactaaaaatacaaaaaataagcagggcgtggtggcgggcgcctgtagtaccagctactcgggaggctgaggcaggagaatggtgtgaacccaggaggcggagcttgcagtgagccgagattgcgccactgcactccagcctgggcgaaagagcgagactccgtctcaacataaaaaaaataaaaaataaaaaataaaaaaatccttattgatatccttccttaataacaccaaaaaagcacatgcctaaagcacaaagcactgatcccatcaccaccctgtttaagaacataagtgagctcccatcttactgcagcataaaatccaaattctttagcatagcattcaagatactattagaagcaatgccgacctgtccatcctgatatcccatctccttaacttcaactaagcaacctcaactaaaggcacataaaaccagcggcttcgcaaacatgtgccatctccgcactggctcttcagttttactatgtagctcctcctctcatctacctgtggatatcctatctttagacgtcaactcgaatcctggctaacacggtgaaaccccgtctctactaaaaatatttttaaaaattagccgggtgttgtggtacgcgcctgtggtcccagctactcgggaggctgaggcaggagaatggtgtgaacccgggaggctgagcttacagtgagccgagatcgcgccactgcactccagcctggcgacagagcaagactccacctcaaaaaaaaaaaaaaaaaaaaaagtcaactcgaatacaaggtctacatgaattatttcctcatcacccaggttggaaaaccgctccttcttttgtatttttataatagtggctaacacttatataatctactattaccgatatgttaaatactatacatataataaggtgttgaatcttttttttttttttttttttgagacggagttttgctttcgtcatccaggctggaacacaatggtgcgatctcggctcactgcaacctccgcctcccagatacaggcgattctcttgcctcagcctcccgagtagctgggattacaggcgtgtgccaccatgcccggctaatttttgtatttttagtagagacagggtttcaccatgttggccaggctggtgtccaactcctgacctccagtgatccacccgccttggcctcccaaagtgctgagattacaggcgtgggccaccgcgccggcacgtgtttaatctttgcaacaaccttttgatcgacgaggaaatactaacaagggacagctctgtggtttctgctatcgaaagtttggtggtttttcactatcaaattctgacttccattaccatcatctacgtacaaatccagttccaactcccaccccaacccaggccatgagctctaatggaggatatatatcagggtcatttgcacctttgttgccaaaactcaacgtagtaccctgaaaatagcagatattttaaaaatgacctgacgaattcagatccccgtctattgcaccgtctatacactaaaccgcgctcttgcacctttcaagtcttccttagtggtgtgttccctacctccctggcttatcaaaggaggtccccaaaacccagttccccaaccaactgaatcctgcaaataacagctcctcaggacccgagacagaccgcttctgggtgctgttgaaaagcagatgggttgagagttggagcatatattcagagactgagtatccgaaacggactattcagaccagccttgctagaagcagaactctgaatacgctgattttatctacatcaaaggctccaaaccggaaaacacaaatattaactagaaagcattatataacattttatttaccgtcttttccggtagacggtaagctccacaagggcggggctcaataaacgtttacgagtggcttaaatgaaaggacgtgcgtgggcacaccgcggggactaatcgtgttaggcccttctccaaggcctatgatccccaacggcaactcgccacgctcctgaagctgaacaccgcgcagggcctaaggtcggacaccctccggcttaggttcacgacacacccattttcccctccctccgccagggccggctcgggcgccggttccagcctcgcgcgccagcccctgtcggccccggcctgcaccttcatccccaggacgtcccgatagaaacgcgccgtctggaagcggtttcccactttgaatacgaagtgcagagctctgcgagcagccatgattcccgccgcacgcagccgtcacgcgcaccgtacagcccagtccacgaagggcgccacgggccgtgacgtcactagccgccgacggcgcgctttcgtgacgcagcccgggtctcagggaacatggcggcgctggtgagacccgcgaggtttgtcgtgcgaccgttgctgcaggtggtccaggcttgggaccttgacgcgaggcgctgggtccgggcgctgcggcggagcccagtgaaagtggtgtttccttccggagaggtggtggaacagaagcgcgctcctgggaagcagccccgcaaggcaccatctgaggccagtgcccaggagcaacgagagaaacaaccgctcgaggagtccgcatcccgcgctcccagcacctgggaagagtctgggcttcgctacgataaagcttatcccggggacaggaggctgaggtgatgtggttcttgagcctgtcgaatgttctcgtttcccttcccgtcgcacagcggaaccttaacctccttccgatggaggacttcttccagtacagcccgctggtttttgtattatgcacagagggccgaataagcgtctttggaattagcttctgtttctccttagctctttgttgttgtttttgtttcaccatgttagccaggctgatctggaactcctgacctcaggtgatccgcccgcctcggcctcccaatgtgctgggattacaggcgtgagccaccgcgcccggccctctccgtagctctttatttctgttacaactaagcgtgtctcagtaacaaggatgttgatagttacctgttttttttttttatttccatctacagcagtgtaatgacaatagtaaagtccaggccatttcgggaaaaacaagggaagatcctgctggaaggtcgcaggctcatttcagacgctctcaaggctggagctgtgccaaaaatgttcttctttagccgtctagaatacctaaaggagttgccagtcgataagctgaaaggtgtcagcctcattaaggtgaaatttgaggatatcaaggattggtccgacctcgtaacgccacaaggaataatgggttagtgattacccagtgtatctttttttttttttgtcttgttctgtcacccaggctggagtgcaatggcgcgatctcggcccactgcaacctccgcctctcgggttcaagggattctcttgcctcagcctccgcagtagctgggattacaggcgtctgccaccatgcccgggtgatttttgtatttttagtagaggtggggtttcaccatgttggccaggctgacgtcgaacttgtgacctcaggtgatcctcctgcctcggcctcccaaagtgctgggattacaggcgtgagccaccatgcctggccttacacagtgtatcttaaggtgtggagacctaggattaatttctcatacttgtcttaggacagcagcattgaaatgaaattcaaaatgttacaattagaaaaatataattctcaaacctgtgtatcttagagtattttcaatggaaattgaaacccgtttttcactatcatttgtgttgtggctctttatggtctctaggaagaaccactattcctcaaaccttctattttttagattacttcttcaactttctatgtcagattaaaaattaagaaagcgtttactgaaagattgagcccttcatttttgcaaaacctctgccaatgtggtgataactgtcaataaactgcttattccagaagcagatctaagaagcgaggtacaagccacaatttactgccccgtttagcccaataaacagagaaccttgtcttctagtctgttccttcatttggctgaatctgacttaaccttatgtaactccgatgttgattagcagttacaaagtctttggtctaaatatgagaagataagtttttcatacgtttttgacatgggagttttaagatatgaaaactgaatccttgaactgctgagagaggagattctggggaaccatctcttgtctctgtaacccagtgagtcacagggatctgtgcctctgcactcagagctcttagatcctaggatggggacttggattactaaagtacctagaattactcatgctaagtaaccatattctcactagctacagccctctaatccacacgccatgcttcagtgaaagtgttattcatttttaccgtgcttgtcacttggggcaggtgtgctcacagtggccagcccatcttgaacttgtgcttgtcacttggggcaggtgtgctcacagtggccagcccatcttgaacttgtgcttgtcacttggggcaggtgtgcttacagtggccaacccatcttgaacttcatcatcatacctgctttcatcatttcctggcttatccttatgttactatattttagatttgagggcagggaataagggagaaatggataggaactggcagcacctgtcaggctttagacagacactccccagaatccagcgacataagtagggcctccgtatagtgggttctcatcaccacagacatccaagtagaagtaaaggacttctaaggtcctcagccctactgaatggcttttggccatctgtgactccgaagtggaggctctctcacagcacacagacgcctaatacccttccattgccttcagtggtggataggctttttacctgcaccatcttttagaaagaatcctaaatctttgattgtatcatgtttcagtacaagtactatttcattcatctcctgacttcagtcagtagcccatttattgtagcaatcatatacgacaaaatactagtaagattcaaaaaaactgtacagtcccttgggagcagactacaaagggattgaatatttgataattatacataaagagtttagggtagtgcttggcttaaaaaaaaaagcttactaaaaggttatcattatcacctctaccagtaaacatggtgattcaaaaagaaacttgtggatatgtgatacacccatgtgaataacttcatctataccacagcaatttcatgtactcaaagccatttttaatattgttattagcctttttccaatttttctcttttcccataaattctttccataaaactttagagattaataatgtagagattatataatgtagattattatataatgtatatataattttatcatgtagagatcattaaataaggagagaattttccactaagaaggccacttagggttttcattttcccagatagtcccagaccccattttactcctttgtattagactgaggacagagcggtcgccagtaagtggctgtacccattctaaagctcccaggcttctggacctccagcgtgaggccttggaagtgactcaagcgttcactgcacctacagccccttcgttttgcagagtatgtccctaagacagtgcttctgagccagcgtatttgaaaaaggggttgttactttgatgcattcaagttttgaaattcatattctttttcctaggaatgtagtttgaattttaaaatgagtgataaaggaaagataaatcagtatagcaggctaataattgttttttaaatatttaagcctataaactattttttaaaagcctacctggtaggaagatgggcacaggttgtagaaacaagacagttaaaggagcacaggaattcactgaagaagatcgcagtcagtcagtaaggtgtttagcttctctagtaatcagagaaaaggcaagttaaaataatggcatgctgttttttctatcacattgggacaaatggaaacaaatgatagacccgcttttaagaagggtttgagctggaaaacaggttttgttttgttttgttttttgtttttgagatagtgtctctgttgcccaggccggaatgcagtggcgcgatcttgcctcactgcaacctccacctcctgggttcaagcaattctcttgcctcagcctcctgagtagctgggattacaggcatgcgccaccatgcctggctaatttttgttttttgtttgtttgtttgagacgaagtctcgatctgtcgcccaggcgggagtgtagtggcgtgatctccgctcattgcaaggtccgcctcccgggttcacaccattctcctgcctcagcctcccgagtagctgggactacaggcgcccgtcaccacgcccggctaatttttttgttatttttagtagagacagggtttcaccgtattagccaggatgatcttgatctcctaacctcatgatccgcccacctcagcctcccaacatgctgggattacaggcatgagctaccgtgcctggcctaatttttgtatttttattagagacggggtttcaccatgttgttcaggctggtctcaaactcctgaccttgtgatccgcccacctcagcctcccaaagtgctgggattataggcatgagccactgcgcccagccgaaaacaggtatttatgagttcctgatgtgaataaactgaaagagcctgtgtgaacgttaatagtgcacgcacatcatttgtccatttcactcacaggtatttatgctagagaaatttttagacacatggacagacagtcctacagggatacccattgcagcagcatttgtaacagggaaaaattcaaataatttaacagtccataggggaagagctaaatgaactgtggtacattcatactacaaaatagaggctgggcatggtggctcacaactgtaatcccagcactttgggaggccgaggagggtggatcacctgaggtcaggagttcgagaccagcctggccaacatggcaaaatcccgtctctattaaaaatacaaaaaattagccgggtgtggttgcgggtgcctgtaatcccagctacttgggaggctgagaggcaggagaattgcttaaacccgggaggcagaggttgcagtgagccagcattacaccattgtactccagcctgggcaacagagtgagagagtgggactctgtctcaaaaaaaaatagcctacagcagttaaaggaaaaaagtagcttcaaacatattgacatggtaagttcaagatatattgttgcgtaaataagtcgattacagaataatacagagtatgacacggaatgtaaaacacatttacatatggacaggtgtgcatatatataggtagatgcatagaacaagttctaaaaggatacactccaaaacagaacagttgagggggaggagagtggtactggtagaattttatgttgtttgaattttgccaatcagaatgtattcgtggttttttttttccttttttttctttttgagagggagtctcactgtgtcgcccaggctggagtgcagtggcgtgatcttggctcaccacaacctccacctcccagattcaagcgattctcctgcctcagcctcccaggtagctgggactagaggcatgcgccaccacgcctggctaatctttgtgtttttagtagagacgaggttttgccacgttggccaggctggtctcggactcctgacctcaggtgatccacccgccttggcctcccgaagtgttgggattacaggcatgagccagtacacctggcctgtattcctgtatttttatgtaactaagaccatatcaagattgataagtaaatgaaaagtcagactattccccgtgcccacaccaggcaagtaaaccacctgttttgtttcctcagggatttttgccaagcctgaccatgttaagatgacatatccaaagactcagcttcagcattcactgcctttattattgatttgtgacaatctccgtgaccctgggaacctggggacaattctgagatctgcagctggggcaggctgcagcaaagtgttactcaccaaaggtaaggacatcaaaggccaggcatagtggctcacactcgtaatccagccctttgggaggccgaggcaggagggtcacttgagcccaggagttcaggaccatcctgggcaacatagtgagacctcatctctacaaaaaaaactacaattagctgggtgtggtggggtgtgcctgtactcagtcccagcaacttgggaggctgaggtgggaggattgcttgagcctgggatgtcaaagctcatcacatgtcaagtgagctcatcactgcactccagcctgggcgacagagtgagactccctctcaaaaaaataataaaccaggtggattagttggtctggtctttttttttttttttttttttattaaagagatggggtctcactatgttgcccaggctggtgttgaactggctctgactcaagcagtcctcctgcctcagtctcccaaagtgctggaattataggcatgaacaactatgcccagccaagtcaatcactgttaggtgagctatggctctgggcaggcagacatgcattggatcttgggtctgccttcactagctgtggtccctgagcagtagctggaatgacaggcatgaataaccacgcccagccaagtcgaccattgttaggtgagctagggctctgggcaggcagacacggctttggatgggtctgccttcactagctgtggtccctgagcagtagtccctgaagtgtcagcttcctcgttggtgaactgggaggaataacagaatctccctggtcactgtgaggattaagtgagatgatgcacagaagttacttcataccttacctgcctcacgagtaattcagtcaatgttgattctcttttttaaaaattatgttttttgtagagacggggtcttgctgtgttgcccaggctaatctggaactcctaagctcaagggatcctcctgcctcggcctgtcaaagtgctgagattataggcattagccgccatacccagccatgtttattatcttttaaaattatcatgaaacctgctaggctgttagagaacttcacatcgattatggaaaagaaatagatgccaattttaacacttggtttctggttctttatgtaatgatattgagttcccaaattgctgagtatatgagccactcctgagtcttgacttctgaatcctatgaaaggaatgacgtcagcagctctgaatcctaatgtcattgtgatccgtttcccttagattcccttagcctcagcgtgggtcacatgccccgcacacaaattcgcctcattacatttctgtctcttctcatcagaaatagggattaataggcttggctctaaacagactttcctcacagttggagcacgcctaaaatgtctcttacaccttgggaggtggaggggacagagagtaccattcatcagaaacaccccagccaccattaaaagtaaactaatagtggcacccgttgttgagacttgcctaaattgctgctcgcagctctttctcagtcacgccttgctagaatacgtttctgtgccagtgtgagagctacgtgctggggttctgtgatcagtacccgcttactcgccccattatttagtgctctgatagctgttgtgggatttggaaataaatctaaataatccaagcattgtggttttcacattgatactgatggctggggtgtaagaaatagggaaagaaggtaggaaatacttggtgtggtgcccagtatccaggacatgaggatgacgggaggagtctcgcctttcccctttcccttctcccctccaggcagaggggtcagcctcggccgctcctctcacacgcctgggcctatctctggtttcctgcagggagagggaaagcccgtggctgggggtgcaggcgctgttacatcctctgtgtcttattctccgtttaaaatctggtttgcctggttcgtctatcccgaggtttgacaaatgaacttctaaaataactcgtcaggagaagacttgcgctaacaagctgtgcgggggagggtgggaggccatgcagtcactgcgaggccccaccctcggccactctcccagcccgcccgtggtgaggagccgcccctgggaaaggccaggcgtcgcaggctgctgccggggttgcctcttgcctcattgcctcatctctagagtgttccctgctccggtgcagactgaacgttgaagcccaatgggtcttgatgaaactatagatctgattctgtcactgctttgcttaagatccctcaatggcatgatactgtcttctgataaaatgccaaactcctcagcttcccataggaggcctcctccgtgttggcctgcccacctcccacctcctgtgccactacagccccagcgctgattgaccggctcactgcctgtgccaccacacccccacccgctgattggctggctcacctcctgtgccgccacagcgccaccgctgattggccggctcaccccctgtgccgccacagcaccaccagtgattggcaggctcacctgtgccaccacacccccacccgctgattggccagctcacctcctgtgccaccacacccccccacccgctgattggccacctcaactgtgccaccacacccccaccggctgattggctggctcacctcctgtgccgccacagcgccaccgctgattggccggctcaccccctgtgccgccacagcaccaccagtgattggcaggctcacctgtgccaccacacccccacccgctgattggccagctcacctcctgtgccaccacaccccccccccacccgctgattggccacctcaactgtgccaccacacccccaccggctgattggctggctcacctcctgtgccgccacagcgccaccgctgattggccggctcaccatgcttgcagtccttaggctgcgccactctcccgcttcctctcctagctctgtcctctgcctgggcctttatctcagtgtggtggtcttttagatggttttcctcatcgccctgctttgtccgtgggttttctatgactgtgtgggtgcttcttttacatcagttactgatactgtagccatctgtttaataccaccccactacactgtgcgttccttggggttggggactttcattatctttgcatcttctgcgcagtgtctggcacgtgtgaatgggagatgttgaagggatgcataaaatatcttcagcactagcaggagtgactcctatagtcgctgtgctggatgctgtcagagagaggcagaaggtcccatccctcaagaaagctatcatagaagaactggtttatctcctgatccaaaattgatcagacttactccacagtcccctggtctgggaagatttgtaacatcttgattgtttcctttttattttccaggctgtgtggatgcctgggagcccaaagtgctccgggcgggtatgggcgcacatttccggatgcccattatcaataatctggaatgggaaaccgtgcccaattacctgccccctgacactcgggtctatgtggctgacaactgtggcctttatgcccaggctgagatgtctaataaagctagtgaccatggctgggtgtgtgatcaacgagtgatgaagtttcacaagtatgaggaagaggaagatgtagaaaccggagccagtcaagattggctgcctcatgttgaggttcagagttacgactcggactggacagaggcgccggcagctgtggtgattggcggggagacctacggcgtgagcctggagtccctgcagctggccgagagcactggtggcaagaggctgctgatccccgttgtgcctggtgtggacagcctcaactcggccatggcggcaagcatcctgcttttcgaagggaaaagacagctgcgggggagggcggaggacttgagcagggacaggagttaccactgaggacgcagaagtgacttctgcttgaggacgtctgcagctcctcctacaccagcacactggtgggaggctggcggagtcagtgactatggcccccacgttcaggaggaaggtgtgatgccgtcatacagttacaggaaaaataagaacttcctcagaaagaacaggtccgaattcttcctgtcgcgtcactgattttgaggttcttttttctcttggtgacaataggtgacccacgtggctctgtgtgtttttaaaaattgtccaccaagaagcactttgtgcccagaaagttcctgaagcatcatcctggcagggaggcgcctgctccaccagctggtgggtgtttgtaatcgccaagcaccagctataggtcacagccacatcactcacagctgatcactggttggtggaaaataaactatgagcagcagattacgttagtaagttgttttgtgtcgttggtgtgtcacagtacctgtcacgtttggcctggtaacgaggacgtggctaagggaacaccaggaagctgagggctacgctcatggcatccagcagctctgctctgggctcagatggtctgtctttgagattgttcagggcttcactgagccactgtttatgtatccatagaaacggcttaattcaacaggccatgtcagaccttcttggcacctctgcagatacctttttgaggactttgcagagacggaagtctatgcggaaaactgaatttcaaaatcggcagcctcaccctgcatgtgtcaggaaagtgtcactgtttcctggttccctgtgttagtcctacttacgtctcatcccccaatgtttagaggccaaggttctgagaatgaacgcccacaatacagcggcaggacccttctgttctctcagcccctccagggcccagggcaagctggatctttacctactagcggccaaaccaggatgtagccagggtgtcagggcaagtgctgatggtcatcaatgtatctataaggaactgtggggatggggtgggtgggtggaatatgggactcttaagcactgctggccaggtgcggtggctcacgcctgtaatcccagcacctcgggaggccgggcgcagtggctcacgcctgtaatcccagcacctcgggaggccgggcgcagtggctcacgcctgtaatcccagcactttgggaggccaaggcggcggatcacaaggtcaggagatcgagaccgtcctggctaacacggtgaaatcctgtcttcactaaaaaaatacacaaaattagccaggcgtggtggcaggtgctactcgggaggctgaggcaggagaatggcgtgaacccgggaggcggagcttgcagtgagccgagatcgcgccactgcacgccagcctgggcgacagagcgagactccgtctcaaaaaaaaaaaaaaaagcactgcttttgcagccacacagagttggagttgaagacaacacaggaagcgtttccccacacccctctgcccagcggctcccgtaatggtttggacactgctcactccagggaggtcaagtgtgttgctggtgtgcccaggagaaaccttctttctcttctactcccccaacttcctagtcaaactccctcttcctagtaaaaccaaatgaccaagcatgattcacgtgccaaggggcaggttgggattgctctcccctgggggaggggtgtttgcagggacagtgtcctcccaggctgacatctgaatatttgaacatctgctctggagccccactgtggtctgggcctgcccagagctccacatgaatgggcaatgcaagtgtccccccaacactgctcccaaaggctggtgcagagaggacaggcggaaaggcggcctggagaatgcaaatccatcccactccagtctccccagacacctcaggacagtgctcaagcagcaggagtcacgaaaaggaagctcacatctttccagcctaaaaccaatctcgtgggatttgttccccgggttatactcccactgactcgttacaaaataacagtgaaagaataaaccatgtattaccttgtccttgtttagaaaaagcaatgtaaacactggaaagtaatttttttttttttttttgagacggaatctcactctgtcgcccaggctggagtgcagtggcgcgatctcggctcactgcaagctctgcctcccgggttcccgccattctcctgcctcagcctcccgagtagcacctgccaccaagcctggctaattttgtgtgtttttttagtgaagaaaggatttcaccgtgttagccaggacggtctcgatctcctgaccttgtgatccgccgccttggcctcccaaagtgctgggattacaggcgtgagccactgcgcccggctaattttttgtatttttagtagagacggggtttcaccatgttagccaggatggtcttgatctcctgacctcgtgatccacccgcctcggcctcccaaagtgctgggattacaggcgtgagccacagtgcccggccaacactgacaagtaattctaagcccattttatcctgggtgtgagagggaaaagaaatttacatccctttgctttagagtccgtggcttatatgccacggtgccttcagttcactttatatattcatgggtataatttagtagggacgagggagggtgcaggagggaggcaaattgtcctttcttcagtgaatacaggggaacagatggttgttatttgctgagtgattctggaaaatcactaccttgaattctcagttttgagtctgacatttgttctgtcaccatttccccagtaaacaggaataaaaaacgagccacatttgacaaggaaaacactgcttggccgagagacaaacattgtcaggatgttggccacgctcccgcgcctttgtgtggtggcgtagctgtcacagtggcgtctgccaggaggtggcaggcgacacctccaaaaccaccccagtgctgaagggcggggctgcgattttttcctggatttaaatcgttgaaaagggaggaaaagaggatggagtgaagtctccctccaccagagagcattttgcaagctgtctgtgctccggggtgttaaagccggagacccatccagattgtcccagaccacctcagaagaaagaacccggagtacaggaagacatgggaacaaaaacggaggcgaaagaggacgaacgggaaatagcaggaaagaccgtcacaacttttccctgtgactgcagcctctgagaaaagcaactctgggcaaagcataggtgtccagatgtgcctggagctcacgctgggtgcccaccggctggcccttcggttcctgcttcggggcagagagcgttgaaatcactctcccctcgccccagccgctggctcctggctgggagcctggtcattaaggtccagaggagaaacagacctctggggacctgccgttcacctgggaccttccgctgcttgccccggggttgacagcaaccccagatgtccgcaccagccacgctgggccacacttagccccacttttgccattctaccacgcacagccctcacacacactccccatccaaggttccagggctctgggctgaaaatcaccagctgtactgcagggcctggggctgccctcttgaccaagctacctctccctcaggagcagagctgacaggctcacctgtttttaagaaaacatgttgccaccttaaaaattccatgattgtgtttcctctgttttctttttttttttttagatggggttttgccacgttgcctaggctagtcttgaactcccggcctcaagctatcctcctgcttcagcctcgaaagtgctgggatgccaggcgtgagcccctgcgcccgccatgtttcctgttttcatcagtgcagggagtgcacacatgtaataagctaggagccaagttagtggatgagctggtttattgctcaggatgactgaagtctcaactacggaaccatgttacattcgagcagctgagacagcagctgaagccaggtcctcccgaagcttcaggaagcctgcttgatgctccacggctgagagtgacagagaatccagaatagcttatggatgggtcagttctcgtctcaccacactcccaatatccagcttcctggactgttgtgtagggaagagccacttttttcagttgaagtctgagttcttatgggccatgaccaaggctgctgcttcctcaaaaggcacgaagggggccgcgtgcggtggctcacgcctgtaatcccagcactttgggaggccaaggcgggcggatcacgaggtcaggagtttgagatcagcctggcaaacatggcgacaccctgtctctactaaaaatacaaacattagcccggcgtggtggcgtgtgcctgtagtcccagctacttgggaggctgagacaggagacttgcttgaatgtgggaggcggaggttgcagtgagtcagatcgtgccactgcactccagcctgggtgacaaaagtgaaactcttgtctttaaaaaaaaaaaaaagaaatgcaggaagggaacagggaacaaggctggggagggaggagccgacggctgcagcaagctccggcctcagcctcccttccctgctcctctgagatgccgagggcggggcgtactcactgcaagcctgccaagtaggacctccatgtcctctgacattcgagagatggattttttggccctgagatcacgtctcctactgtgtcgtcattctagcacctgtgggtgacttcctcatgtgagtgaggcataagcacccggaatccggactggaggccgtctctgcctctggattgcacactggcctacagacctggggacagagtctttcacgagttgtgtatcgtttaacagaaacccaacagttccacccaaacctcctgacacattctcgggcttgggaagtgtcccaaagcaccaagggggtgagacacacgccttgaaaaatggcagtaggcatacttacctgtcttcatgcgctcacatacgaggtgtacctagaacgccctcatgttatattcccagcactaatgaagctactggtcaacagctatttgttcccaaagaattttcccttgcgcagccgcagcctggaggaagcagggcgtgtgccctcgtctgctggcggcagcagtgaggggtgtagccaagtgcccacttctctcattcagctgcttcggggcaaactggaaagatcctttgagctcacagccccctgctcagtgctactcctgaacctgcgggcctgtgtgcacagccacccacagcgcgcacaacacatgggcctgcccagggcaacggcaccgtcaacagcgtgtgccctcgctcagggccctgctggtactacgcttcccagtgtgcagggttcccagacgtgtgtcctctcatacattgcatttcctccctaagctgcacggggcaacaccgtgttaggtcccgcgcatctgctcctgggccacatccggctccgtctgtattgttcctgaattcagtttgctgtcctagaacaaggcagcaggaggggagaacagcttttcagtgtctttaattaggcaacaggaaaaaacaaagtctggctgaaaattactatttgaagcttggccgatgccaacacagcactcgctccctgcgttctggtaagtgatggccattgatttcaaggacgtaccaaggggcgaaaagcaagagcaggaagtcacctcgctctggaaaagaagctggttttcatctgctgtatgtgctggtcccaaacatacccttttctctttttttagtattttttttcccaattaggaattcaatgtggaaaacataccctttttcttcaacaggcttttaatgttgggaagacaggttaaaaaaaacaacaacaacaggctggctgtgccggcgcacgcctggaatcccagcactgtgggaggccaaggcaggcagatcacctgaggtcaggagttcgagaccagcctggccaacatggcgaaaccccgtctctactaaaaatacaaaaattagtcaggcgcggtggtgtcgcttgtaatctcagctacttgggagactgaggcaggagaatggcttgaacctgtgagctgggatcgtgccactgcactctagccggggcgacagagcgagactctgtctcaaaaaaaaaaaaaaaaaaaaaccctcatcgctgttgtgaggatgaatggatgggatctggaagtcactgtggtaaacacaaatctgggaaccacagagtggcgttttcacagccgcccccagcctccacctgcagggcctggttttcctggctgccggaggaagcccttgaatatgccacagctggtgctgaacctgcttccaattagcaacaagaatctgaaggtggagctgcttggcggggattatcatgccacccacttcgcctgcatctgtggcctttacgacctctcactatcgatccctgacactcagaagtgattcttccctaacggtttcccgcaaagcagtcactgtataaacctgaacctttggagtaaaccttccccacgggtcttaaggaagctacagacccactctaaaaggggaattctggtgtcaagaatccagttgcaatgacttagggcaaccccctcgctggactttgttcctcctgccccaaaggtaagcagctgctaagagaacccacctttcctccgaggccatcatgatacatggagagaaatcctgccacctcccacattcaggtcggccacattcatcccacccaccccgacccctaagggagactctggcagcgttcccagagaagccttgagcctgggacctgctgggtttaagaggctcccacacttggcccattcttcacaaggagacccgtgcgtgattcctcctgttctcccaaccagctttctcaggcttcagaggactcggctcccctggagggaggaaatgggcaagaatgtccacagcaaggtacgcgatctgaggattcaccctccgtccagggccaagtcaaaccaggagagacggtggccagggctgcaggagggatctgcctctgccacggtcatccaaatgagcttcctggctgccggaagccaagaggatgtgacagatgctacatcctgggggtctcaaaactcctgggactcagctcccagctaccaggtatcctccactgcccaccccgatagagcacaggaccacaagcaaaaacaacttttgtgatcaaggacagcagaggcccagggtggatgaggtccagagatgcctgctttatttcctacggggtgatcgcatttcaggctggtaacatcacataacaagtctaatcgccaactagttgtacgcctctgaactacaagtcaacaatccaattcagcaaggaacaacagtgtcaacagctcattagcgggtggggaccggattttccaaatcaatggtcttggctggcagagtgctgagtggggcctgagtgaatgaggctaaaacgcttggccgaagccgtccatccccaatcctgagaacagagttgtctgtttctctttcgggggtcaggtcagcccaagtaagaggccaacaacctacctgggccgatacaaggcgacacaaggcccacccgtggctgacgcgccctccaccctcactccatcccggggcacagctccttccgctggtgcttaggaaaaggcgaggcttctggtaatttctcatctttgtagttctgctttgaaaagaaaagggggccgggcacggcggctcacgcctgtaatcccagcactttgggaggccgaggcgggtggatcacctgaggtcaggagttcgagaccagcctggccaacatggtgaaaccccatctctactaaaaatacaaaaattagccaggtacggtggcgggtgcctgtaatcccagctactcgggaggctgaggcaggagaatcacttgaaccttgggggcggaggttgaagtgagccaagatggtgccactgcactccagcctgggcgacagagcaagactccatctcaaaaaaaagaaaataaaagggaatggcaggggtgatcgaacgtgggtgtgggcacctcagcagagatcaggggccttgggcacagagctgggtggagcgagaggtccgtgctggtgcagaggtgctcctcctaggactcagggctaagtttcttgggaagatgtccaaagagaaggattcgttaacagaatttcaggatcgtgggagctgtttgtatgatatgaaccattaccttagctacatttttcttctcacccaaaaaacctctacaagcttccttttgcatttggagatcccctgcctgagaacacaagagtgggctgcttttctctcagaccgaggaagactgtgttgcttagaaaaggacgtcctcacccgcagctctaagcggaggccctttctcagctcagcctccacgcaggtgtcacccggcggttcccctctggccgtccggggccgtgtgtgccgacgtcagagtcagagcccgagcgggacccaccggccctccacgctcactctgcccaggacaccctggcagatccttcaccaaaagctagtgactttgcgaaagccatgcagccccgctctggccgggcccccggccatcccgtgctcccaaacagagtctccaaacacggtggactctgccgctgctgattccacaccccagggtgctggctgaggagtttactgcagaaacaaggcaccacagagaggctggacacttgggtggtgggattcggggcacgctgggtaagtccaagggcggaaggaaggagggggaggaggagaaggctgagttttaaataacgtctcaggaggccggagccacgctagatgggctccggtttgagcttctctgctaggaagtcattcacaaaggcctccacgatggcgggggtgatctcctccacgtccatcacgtacttggcccgggctgacatgtccaggatggtgagcaaaggggcagcctcaggcaggttggtgtaatctcgcagggagtcagtcatgtcatcctgaagccgtcaggagggagagaaaaccaagaagttttaaagaaaggagggggagagtcccctgggcccagtctccccaggtgtggtagctcccgcaccctgaagagccggcgtttcccaagcagagggctcccagcctgggaaggagggaaccctgccctgccttccggaggaaggggctgctttgtaaaattctctctttgcatccgccctgcaaaccactaggtaagtcgtctgtatttaattatttatgtatttattagcatcaacaccattttaatacgtcctcagcattttagaaatgtcacattcttttttttttttttttttttgagatggagtctcgctctgtcacccaggctggagtgcagtggcacgatctcggctcactgcaagctccacctcccgggtttaagcaattctcctgcctcagcctcctgagtagctgggactacaggcgcccaccacgcccggctaattttttacatttttagtagagacggggtttcaccatgttggtcaggctggtctccaactcctgacctcaggtgatccgcctaccttggcctcccaaagtgctaggattacaggcgtcagccaccgtgccagtctagaaatgtcatagcctctgattgtttatttttgtaaccaactgtcaatgatttgcagccccactgtgggttatctgaggccaatctggacttcaactctggaatgtttttaaacagagacagctcgctgtgttccaactcccacccctgtggtttcaggcaggacaggagctgcacagccagccagttcagaagacagcgctgcttaagcactgtggaagcttacgctgcctcactacttatctgagaaagaagctggcactttatcctacattcccagcagctgtcctggtgaatttccctaatagcagacatagcctcatgcagacaccaaggcaaacacagaaatccaaagacaaggagaaaggatttgtaagggagctactttttttttttggagatagagtctctttctgttgccccagctggagtgaagtggcgcagtcatagctcactgcagcctccacctcctgggctcaagcaatcctcccacctcagcctcctgagtagctgggactctagccatgcagcaccatgcctggctaatttttgtacattttttggagacacaaaagtccagcccagccagacgggagccagcaaactgccttggagcagcccctcgtccactctgaaccttgcctccctcccctgtgaaacaggacagcgactacgttcccagccagagagccaggagcgaaggagacagcccaggtgaaatatgcggctctgtgcctggcgtacagaaaacctgcaaatgctccttccagacttgacacctctcaaggccgcccccgcccgtgcccggcccctgctgtgctgcagccatcttttctcagagccattctgcaggggttggagtcactgcatgccgcgcagcctccctggggctgggcttggtgtgcagtggccagtgccaccccgaggcagggcctgtgaacctctttgctcccctccacccccgggctgagcaggtgactggagccgcctgggaaggacccaggtgctgggctgggcagggccgggggctgaggtgatgaatgggtggcacagggtgtctggctgccgcctgcctcctccgtgcctctcctgggatccaaacacagcgtgaaatcagcacagggctctgaccaactggaggtacagatgggtggatggagggcagggggcggcctccaaaactgtctgtcagtcagtggggtggggtggggtggggaggtggcagcgcaggcatggaggaggctcctgggttggaggagctcaagaatgagagcctgcacctgtgctgagtcgcggagacgcccgtctgcagggtgcagggtgcagggttccaggccctggataactgggtacctgcgggagggcgctctgctgaaagccccactttcccaccctgtgaagagtctcctgcctggtccagccccgctggagacctcaaagggacagcctgggtgaaacagacggggagcggcagcaatttccaacctcagcactcaccgggccggctgggtgaccgcaggtataagcagtagccccagccaggatccctctgatgagatcggcccactgcagccagcgcggaggcacgaacccagcattttgtaaagactcaagggcctggttgtgacccaggaggtgtggatcacactttgcagccacggccactctccccagccgctcaggcgggaagcagcctggggacggctccctgctgacctgaggctgccgagcatggacgggaagaggaagcagcaggggagggaatggttttccatggcgaatggctacctttccttgccacatttgtctgtgggctctctcagaagcacaggcagccctgaccctggggtcctttcaggcaaccctggggccaggatcagtcctgtgccagaagtcccagctgagccagccctgggccaagcctctcctccgcactcacctccccggctacgaagaacagaaggggtgcctcctcctctttggctttgtacttggcaatgattttctcagctatcggctgaatcagctgcttggccgcctcggactctccgtcatcctcagaatctgtgattgggtcgggggtagaaaaagacggggagaaaaagcactggcttgtcaaacagagcggcacccgccgagggggcctgagctgcagaaacgcccgcctgagcggcccctgaacggaaatgaacttccccttggatgcaggtcttgctccccgcatgcatgggtgtgtgtgcacatgcgtcccagcagcaaagctcacagtgctctcctgcaccgggctccccaggaggaacctgcctcactgagcagctctgctctcccaggtagacagtcttcccattgaattcctcacaaacccgcctgggaggctgagcttcccctaagccaggacctgaggcgcctgctagtgtttctctcagccacagaatgagaagccatgacctccgacctccgacttcccagtgaaaatggcagaagaactggtggtgagcgggagggggtgaggactgtggtctggtcagcggcttttttttttttttttttttttttttgagacagagtctcgctctgttgcccaggctggagtgcagtggtgccatctgggctcactacaacttctgcctccccggttcaagcgattctcgtgcctcagcctcccgagtagctgggattacaggcgtgagccaccacacccaggctcgtacagtgattttgagttgttggaggggagccacaagtccaaggcagagggccaggttttgcaaaaggaaccagggtcatcccatcagactgcagggagcctggcatggatgcgcctgtgtccccctggcccggctgggcagttacccacggagctcagactgggtgagatgggagacggggaggtgcaagcgaggacaaaggagccaaggcagccaccgggctggagcagctcttcagagcacagaggatccgcagaagcagccttggtgagcctcggccagaggggcccagcccctgcagctgccgtgtgtgccacccgccctttccaacaatgggtctgcgcatgggggccccgagggcatcctcccggcctgacctattctgcccagctggcagctggggagcagctaggagggaaagtgcagctgcagctcccacaggggccagccatgaataaatcattggggtcaaaagcaaggcttcagggagagacaaaggcccaggcttgcactgctggtgacagagagaagcggcagggacaggctcctcccaagtgaggcccctcctgtcccgccccccagccacccctcgccccctgcccccgtgagcttcatacctacaaaaaggacgaggcaggggccctcgttaagctgcgcggcgttggagtcggagagctccagcacgggcttggggtgccaggggaactcccggcagtcctcgtcgttcagcacctccacccgcccctgccgcgtgatcacctcgccctgcgggtccagcatgatgagcgtggggatgcctgcagggaagagggggtgcttggccgctggcccgggagatgctggccctgcctggcaggaggctcgcggggtccagcccggggtccccccgaccgtggtggagcccaccgaggacctggtacaggctcacaatgaagaggccaggtctaaagtcacaaagcctggggagaatccaggcctggccagggggagccatggaaccccctcgggtcagcctgtaacctgtcaccttcgcctttcagggcctcaggatcctcagctgcagcctgatgagtgtgttgtcgttcctaccttattccgctacagaaagatcaatgagttcatgcggttaaagaacttagagtttgggaggctgaggtggatggatcacttgaggtcaggagttggagaccagcctggccaacatggtgaaacccccgtctctactaaaaatacaaaaactagctgggcgtggtggcgggcgcctgtagtcccagctactcgggaggctgaggcaggagaatcgctcgaactcgggaggtggaggttgcagtgagccaggattgcaccactgcactccagcctggacaacagagcaagattctgtctctaaacaaataaataaataaataagaacttagcacagggtcatggcgcatcggagcaatcactcactgctggtctcccaaagacacagaagaccttccccagctgctgggggtcaaacacggaacaggcagtgcagtgaccacacggcggacttgctgtggccaccgatgcaagacgggtcctcgcccggccacagtgagcgcagggccagtgccgccggggggaacctgaggctggccgcaccggagactcgaagaggaggacagctgactgcagcccccgccgtctgcaccccagccctccccgctccccagggctgcagcccccgccgtctgcaccccagcacaaccccctccccagggctgcagcccccgccgtctgcaccccagcacaaccccctccccagggctgcagcccccgccgtctgcaccccagctccccccttccccagggctgcagcccccgccgtctgcaccccagctccccccttccccagggctggggaagaaaagtaacagaaagcttgcctgcaaaccagaaaccgcgcaaccccagccaaaaagccttcaatgaaaactcagagaaagccccactctggtcaaggtgcacgtgggttttctgtgtctctgttctttttaccccactccccgcagcctctcctccagccagggctacaggcccccacccacggcccacccttcggggacctttgtctctccactggcagccgctccccccacaccctgcacgttccagacgcctctcctcctgggctgcccagagcctgaattttatgtgaaagtcagagcaatttaatatttatagattcccaaggattcggtcagtaatttgctccgctgacattctccttccctgtcggggggatgccgaggtaccagacatatggccctcgtgtttcgtaccctgctgcggccaccagcaccgcgggcgtgcctgccttcgaaaggaatcaacgaatccattatgttcacacctatgagacaaagtggctgatgtatcagggagtgggtccagagagaacaggctcttgagaacagccactccgacatcacacacactcacatacacacacacacacacacacacacacgcacgcgcccacacacacatgcggccggctctcactggggattttcgggtgtgctcagcgtggacagtgcccgaggagctgtgtgtgctgccgcacaagaaacctgggcatttccagccacatcctcaggctgcattttatcccctgaggccggggtccatgcccgctgtgtccatccatgaggctcgggggctggtctcgaggctgcagcccaaagggaatccgggccagggaccaccacagggacagctggccgcacaggagcccctccacatcaccacacacccttctcaaaatccccccggcaaggtccttcctcagagtagggtgtttctgaaattgggcaattatgagcactggggtaaaccagagcccctgctgctgtgacaggccccgcggccagcctgcgtgtgccccggcgtgggatgccgagtgggtctgtggaagagaggcaggcacgggggacggggagggaggagaagccaacctgaaggcaaagctgcccatttcccggctcagcgcctggggctctccgagggcctcctccaagcggcctttttcctgactgtggctgcagcctcttttgagtccgtgcctgcggggcccaggacagcatggcgaggacacggagcccccacctggcttctgaggagcactcaggggcttccccgaggaacggctcctcctaagacgaggtgtgccgggacgggccgtgttgggccgcgtgactgtctgcataagcagaaaccaacttgggcccaaggaagccactcgtgttcggcccctgcacgggggaaagcacccatgtctgctgtgccaggctgcctcccctcagctggtcctgacgagcttggcctacagccatgacgagtgcacatccctccaaaggtgaaccaggggcgggaaacggaactggcttctgcggccgtctgccctgtgctaggcacggcacagatggcactggctaatccttatcacagatggggcgggcagcatcaggatccccctaacagatggtcaaggtgacccccaggtcacccagccaggcagtggttacagtagggatgggggtcacccagccaggcagtggttacactggggacaggaccctgatccacctgttgcagaagctgctgctcttcctgccaggccgtggacgcttctggggtcctcacagcacctgcgatggggactgtcttaaccagggcggggaagtcctgtacctgcagctttctgcaccacccacctccctctgctcctgggggagaaggctgagaccacagccaccatttccctttctcccccttcacacacgccctgttcccccagcccttgaagcaggttctctgaaatacacattttttttttttttttagacgcagtctccctctgctgcccaggctggagtgcagtggcgcgatctcggctcactgcaagctccacctcccgggttcaagcgattctcctgcctcagcctcccaagtagctggggttacaggtacacaccaccacacccagataatttttagtagaaacggggtttccccatgttggccaggatggtctcgaactcccgacctcaggtgatccgcccacctcggcctcccaaagtgctgagataacaggtgtgaaccaccatgcccggccagtgtaaaacacttattagcagagtacctggtatattgatattgtaagtattctataagtattggctattattataaaccagttttttttttttttttgagacagagtctcactctgttgcccaggctggaatgcaatggtgcgatctcagctccctgcagcctccgcctcctgggttcaagtgattatcttgcttcagcttccccagtagctgggattacaggcacccgccaccacacctggctcatttttttaattttttagtagagacggggtttcaccatgttggccaagctggtctcaaactcctgacctcaagtgatctgcccgcctcggcctcccaaactgctgggattacaggtgtgaggcaccgcacccagccattatattcttttaatcacccctaaactgattatttggctcgtgagaaggcagacatacggaaaactgggagcttgctctagtgagatcaacagagtcctccgtgatgggctggaagaagttagctaaagaagcagaaagcagagacactgtcaagaccgtggtgagggttccggcaacagtgtgatgtctgccaagggtggggttggcgtgcttttgcttccaccatcccaagctacactcctgggcttggaacacggactctaagttcctagagagggcgcagccctgagtcccctgctctgtgacatgagtggcgcctacagacccctttcaccgtctccctcaaaacacacagaagagtcaactccaaactctcttctccaaggaggagcctagttgcaagtatttaaaaccatctcaaagccaggtgcgccgagactgtcccacggtttagtctggtgacttttccactgccaacgagacacggagttttgaagcaggtgggggctggggcaaggaagctgaaggggtccaggaccctgggaggcagagaggagcgggcagggctgtgacccagccttctctgcatctggatggcaacgtgatctgaggcagccaggaggaattacccaaagattgctgggagctgggaggagcaatggaaggaaaagcaggttctaggacagaaagagctggtgaggacgcaccagcaggcaaaatattaagtgatcatgaaaatggtccttacaaagaccatagcgacacggcaaatttttgcgccacactgtttagtaaaaactgccgagcgcacagtgccgtgtgcatgtgacgagtccgtgtgagcggcgggcaccttacgagccagtgcgagcggcgggcaccttacgagtcagtgtgagtggcgtgtacgttaagagtccctgtgagtgccgtgcacgttaagagtccgtgtgagtggcgtgtacgttacgagtctgtgtgagtggcgtgtacgttacgagtctgtgagtggcgtgtacgttacgagtctgtgagtggcgtgcacgttaagagtccgtgtgagtggcgtgcacgttacgagtccctgtgagtggcgtgcacgttacgagtccgtgtgagtggcgtgcacgttacgagtccgtgtgagtggcgtgcacgttacgagtctgtgactggcgtgcacgttacgagtctgtgactggcgtgcatgttacgagtctgtgagtggcgtgcacgttacgagtccgtgtgagtggcgtgcacgttacgagtctgtgagtggcgtgcacgttacgagtctgtgagtggcgtgcacgttacgagtctgtgagtggtgtgcacgttacgagtgcatgtgagtggcgtgtacgttaagagtccgtgtgagttgctgctgaggcaggaatgtgggtgggatgacagcgagatatctatgtctagttacgttttctttaacggcagcctatttagctcgttaacatcagatgaaaatcagaactgaaaggccgtgggggtgagatgggatgacaaacaccaaccaatgcccagaatctgttcctcggatccttccgttcctccctcctcccggctcccccaaaacactcccctgcttagagagttaaggaaaggagccgggcacggtggctcacacctgtaatcctggcactttggaagcctgaggcaggtggatcccctgaggtcaggaggtggagaccagcctgaccaacatggtgaaaccccgtctctactaaaaatacaaaattagctgggcgtggtagcgcacccctgtactcccagctactcaggaggctgaagcaggagaatcgcttgaacgcgggaggcagagcttgcagtgagcggagatcttgccactgcactccagcctgggcgacagagcgagactctgcctcaaaaaaaaaaaattagacaaaacacataaaagagaactgcaaaaccgctctaaaggtctcgaggcagcccctcttctggttgaaacatgcaatctccaaatgtttcatttttatataaacagattctgcctcaaatccatttttttgaaaggggcaaaggaagagagtcaaggaagggaacgggatgaggaaggagggaagcagaagaggaagaaagaaggaggcggagaaggcagagcgggaggaggtggcacaggagggaagaaggaaaacagagaagaggattcaacgctggaggagcaaagggccctcaccccggccgcccggcacctctagctgcttccgcatctgctccaggccctgcacagccctcaggccgtccgccctccctgaaggttgggccacgggagccaaaccagacagggcccctggcctaagagagaaggggctgtaaacctccctgcaaagagtgccgtgctccctggcagccgaggatgactcagacaactgctaacggggtctgtcttctgccaggtgtgttgacaacggtctccttagaaaaagaattttcagcactgcacacggctgcacattccccaggctgcgtaaagccccggggttggggggggggcagcactctggaagccagttattcccacgagaccaggaggtggggggacgccaaatgccaggtccttggtgagcccagtggtcctgtggagatgggtcacacagcccggctcagcccagggcaccgaaggaagccggtggccagcctgtcagcggcagtgggactttggccaggccggcctggggcccaaactcatcatcaagaccacggcagaggccgccaccctgtgagatggacagctcaagggcacagcctcgaggccccgactcccccacccgtaccgccccccagacacctcaacgcactggcagcatttggcaggcccccttcactcggcagggtgattctcaaaaccccaagatgcttataggactccgggttgtgcggttacccagttctgctttttttttttttttttttttttttgagacggagtctcgctctgtcgcccaggctggagtgcagtggcaagatctcggctcactgcaagctccgtctcccgggttcacgccattctcctgcctcagcctcccgagtagctgggactacaggcgcccgtcaccacgcctggctaattttttgtatttttaatagagacggggtttcaccgtgttagccaggacggtctcgatctcctgacctcgtgatccgcccgcctcggcctcccaaagtgctgggattacaggcgtgagccactgcgcgtggcctgggttacccattttcacccgagcctgtcagaacactctgccctcacatgactcaatccacaaaatgaccagcagatcaagccactgccccagtgtaagtccaaagacaggccaggtggaggcggctccctttgggtgcaggcagggggtgtacctggcactgctctgtgaaggaatctttatacaagctcttcagcgggagagaaacaagtgagatgggactgagaccccagggcacagacagactcaaacagggagcaggacgtccccagagaagccccacaggatgtgcagaccagacactccaacagccaggaccctgcagagcgagtgtgtgtgtgagtctgtgtgtgcacgtgtgtgtgatggcgcgagtgtgcattgtgtgagtgtaggtgagtgtaggtgtgtgtgagtgtgcatgtgtgtgactgtaggtgtgtgtgagtgtaggtgtgtgcacatatgaatgtaggtgtttgcatgtgagtgtagggtgtgtgagtgtagggtgcgtgagtgagagtgtgcatatgtgtgagtgtaggtgtgtgcatgtgtgtaggtgtgtgtgcgtgagtgtaggtgtgtgtgcgagtgtgcatgtgtgagtgtaggtgtgtgcatgtgtgtaggtgtgtgtgggtgtgtgcgcacatgtgaatgtaggtgtgtgcatgtgtgactgtaggtgtgtgcgtgtgtgagtgtgcatatgtgtgagtgtaggtgtgcatgtttgtaggtgtgtgtgcacatgtgaatgtaggtgtttgcatgtgtgtaggttgtgtgcacgcgtgtgtgaatgtgtgagcgtgtgtgtgcgtgtgttcacacacctggaacacgtccactgaatgacactggaagccgtaaccacggaatcacacaaaagctcagaaatattcagaattcaatcaaaaatactggtcagagttttgtgacgctacaaagcttatgaacgaatgcacagttccttcagaggtatttcggcccagcctggccacatttaaatatcctcagaggcaaagaaaggcaaactcccatcaagggatggtgcagtctagggagggtggctggcttctaagactagagagaagccagaactgataccagtgaaaccagggactgagtgagacgggctctgaaggagaaacggcccccggcttggaggacaaggacagggcaccacaaatagggccatcgacgcggacggaatgccgcacgtggggctcagcccaacctcgaagcgctgagaaggcgcttccaaagtgatatccctggaatgatataatgatttccttaatacgtgagcatctttcaaaactaggaggatctggaattaagtttagaagtatgaatcaaactcatgccactgacgtttctgtgtgtcaagaagtgcatgcatatttggtatttaacttcagcattttttttttgtttaagagactacggccggccgggcgcggtggctcacgcctgtaatcccagcactttgggaggccaaggcgggcacatcacgaggtcaggagtttgagaccagcctggtcaaatggagaaactctgtctctactaaaaatacaaaaattagctgggcgtagtggcaggtgcctataatcccagctactcaggaggctgaggcaggaagatcgcttgaacccgggaggcagaggttgcagtgagccaagattgtgccaatgtactccagcctctgggtaacagagcaagactctgtctaaaaaaaaaaagagccgggcacggtgactcatgcctgtaatcccagcactttgggaggccaaggcaggcagatcacatgaggtcaggagctcaagaccaggctggccaacatggtgaaaccctgtctctactaaaaatacaaaaagttagccaggtgtggtggtgggtgcctataatcccagctactccggaggctgacgcaggagaacggcgtgaacccggaaggcagatgtagtgagcagagattgcgccactgcactccagcctgggtgatagagtgagactctgtctcaaaaaaaagaaaagaaaaaaagaaaaaaggctgtcctagggtaccttattagtttcaggtgaccccctggcctgagcgttggccaccagcaataccggcaacccacgggccctcacatccaggaaggaactccgtacctcagagaggaagattctgctccacggatgatgaggtgctgggaaagaaaatgcctctatgtggaaaggcctcctgacccaatggagcagcagagagggggcgcggcagcagctccactctaagtgacaagtgtccgtcttccaggccctcgtacgaaatgacacgtactcggaccaacactgtcgtgttcgtgaagacgtcatcacactccgctcctcagatatgcccaactgtccatctcatcctgtccactcaagggcagcactgggcccctctcctagtgacttcccgtggagctcagtacggagagtatgggatggttagcacgcactcaatacatcaaatccggccgggcgcagtggctcacgcctgtaatcccagcacttagggaggaatttcactcttgtcacccaggctggagtgcagtggtgtgatctcggctcactacaacctccgcctcccaggttcaagtgattctcctgcctcagcctcccgagtagctgggattataggtgaccaccaccacgcctggctaatttttgtatttttagtagagatggggtttcgccatgttggccaggctgatctcgaactcctgacctcaggtgatccacccacctcggcctcccaaagtccagggattacaggcgtgagccaccatgcctaggcagtagttacaaattcagctgagtcttctaggtgctaaagcaaagaaaataattgtggttcataatgaaattcaaagtatacaaaagataaaaacaaaagcctgccacccggtaggttttgaaggcgatgaggcactcacagttcagctgacatccatccatatgatgagggccagtgtccactctagatccctaagctctgtaggttttgaaggcgacaaggcacccacagttcagctgacttccatctgtatgatgagggcgagtgtccactctagatccctaagctctgtaggttttgaaggcgacgaggcactcacagttcagctgacacccatccgtacgatgagggcgagtgtccactctagatccctaagctctgtaggttttgaaggcgatgaggcactcacagttcagctgacttccatccgtatgatgagggcgagtgtccactctagatccctaagctctgtaggttttgaaggcgatgaggcactcacagttcagctgacttccatccgtatgatgagggcgagtgtccactctagatccctaagctctgtaggttttgaaggcgatgaggcacccacagttcagctgacatccatccgtacaatgagggccagtgtccactctagatccctaagctctgcaaagcgcagggcctgttatctgttttattcaagataaaaacgttcttcttggcctgaacgtttaacgtgcctccggatcatgtgtgaggggtgctccaagacccagccacgtcaaacagagtcacactttgtacacacctgtgcacacacgtgcacacacagaggccagtagggaggataagaggggcctgaatgtgaccggcgggcctttgttaggggagtcggaggaagacacacatcagagaccatcacctcctggtgtataaggggaacagggattagaagaaacccaggatatctctgtatggagaaaggatggaaaatccacagccatcaggaggggcaggacacggcgctcggtaacgcttgggagagacctgggccctacgtagctgactagcatctcacctgtagcccctccaagggcctctggttgcaactggaagctgaggccgaaaccccttcccactgtccagttacaatcaggcagtcacgtcgcttttaattaacacagagtcgttctggggacgaagacctgaatcccatggattagaaggacaaagtacaacccatgtatttttttaaagtgcaaaatgcttacagccccccagaccttcactgtccctgtcatggtctctaaggagagtgccctgtgaggaccaggccaggtctatcctgtgacgttgcagccaagatccttctgcaagaaaacgtgtcggccgggcctctgcacgtgcggttccgtctgccgggaccttccctccaccatctgcttggtccgttcctacttggtttccagatcccctggggcatccttggtcttctctggtctccccgacgaggccaaatctccctaccccagcactggcggcttcgcattcaaagcactcacagttcaactgacatccatctgcacgattagggtgagtctccgctctagacctatacgctctgcaaagggcaggacctgtatctgttttattcaagtctgtgactccaatcccaggcagaatgcaatggcatccagtcagccctcagtaaagacattcactcagcaatgaacgaataaatgaattaagagatgggaagccctcctgacccccacacagtggtaattcagccagctattcaggaccactggcgtaggggcatcccgaaacttatctcaacaaacacagctcctacccccaggcacgggcaccttaagtgtctctgcagagggccaggcaggagtaagcgctgacctccttggcatctccaacttggggccttttcttctggtccactaggcaacatcatgtccctcaacttttgtttggaaagcaaacgctttcatttatgctgttaacaggaggcagcagcaccccccgacacaccccaaattcccctaggattaacgaatggatctagactattaatactccaagtgtggtccatgggctggcaacatcagcactgcctggaggctgctcagaaacagtctctcagctcccgcttagccccaccaaatccaaatctccattttcagatctccaggtgattctcatatgtacttgggattgagaagcaccaatctaaaattaaatattattttttttaaaacttctgctccaaacaaacccatatatgtattctaaatggtgaagaaaaaaggtcaaagagcctaatgaggccagacgtggtggctcacgcctgtaatcccagcactttgggaggccgaggtgggcggatcacaaggtcaagagatcgagaccatcctggccaacatggtgaaaccccatctctactaaaaatacaaaaaatttagccgggcgtgtggtgggtgcctgtggtcccagctactggggaggctgaggcaggagaatggcgtgaacccgggaggcggagcttgcagtgaaccaagattgcgccactgcactccagccagggcgacagagcaagactccaattcaggaaaaaaaaaaaaaaaaaagagcctgatgagatgcccctcaggcgcagaacttctgggtaaatctggatttgtcttttttttcactctctgtaaccctaggagtgctgagaactcaattattagctgtatctgtttacagctgacaagcatctgccactaatgatacaaagagaacgcgtttaactcagactgcccagttacctgctttgtgaagagaaaaacctggctgggtgaaggctgggaaggaggtattcacacgataaagaataaaaatacattcagtctcattaacaatcattatttccggctgggtgcagtggctcacgcctgtcatcccagcactttgggaggccgaggcgggtggatcacttgagcccatgagttcgagaccagcctgggcaacatggcaaaacttcatctctactaaaaatacaaaaaaatgagcagggagtggtggtgtgcacctgtagtcccagctactcgggaggctgaggtgagaggatggcttgagccctggaggcagaggttgtggtgagccgagatcacgccactgcactccagcctgggcgacacggtgagaccctgacttaaaaatatatatataatttctgaaaaacaccatgattagtactctaagtcctagtttacaacactctcaggaaattgattttctcaccgagaaggtgatacccactcagccctcactatcacgcctctttacatactttacttattcatgctcccaacaattctctgtggcaaagctttaccaccccactttgcagacaaggaaactgaggcccaaagactctgagtgatgaaactggagatcactctcaagtctctttcacagtaaacctttgggataagattctggccaagtcatttgggaggctgtgctccgtgtcccaatcatattagaatccaccatgggccgggtgcagtggctcacgcctgtcatcccagcactttgggaggtcgaggcgggcagatcacgaggtcaagagatcgagaccatcctggccaacatggtgaaaccccatctctactaaaaatacaaaaaatttagccgggcgtgtggtgggcgcctgtagtcccagctactggggaggctgaggcaggagaatggcgtgaacccgggaggcggagcttgcagtgagcggagatcgcaccactgcactccagcctgggcaacagagtgagactccgtctcaaaaaaaaaaagaaatgcaccatgctggacagtgagaagtagctgtcttactaagacagtatttagtagtagtattttttgagacagagtctccctctgttgcccaggttggagtgcaatagcacaatctcggctcactgcaacctctgcctcctgggttcaagcaattcccctgcctcagcctcctgagtagctggtactacaggcacccgccaccacgcccagctaatttttgtatttttagtagagaccgggtttcaccgtgttgtccaaactggtctcgaactcctgagctcaggtgatccacctgcctcagcctcccaaagtgctggggttacagtgtgagctgccatgcccggcctgacaatacttattttttaaaaatggcttagaattcacaccatgaaaattctacactgctgagaaacatgaaaggcacatgaatattcatggaaataatgatgctcttcttcttaaaggaaagccaaagacacggtgagctcaggtgagcaggtttccaggagccacacggagccggggcctggagcgcctaccttggattccgtacagccggttgaggcgcgaccgccgggcctcatccgtgtaggggacggcgagccagggcatctcactgaagtactgtttgaaggactcctccgacctacagagagacacacgtggcgggcaaggctcagtatccccactgcaccaacgctgaatcctcccacctctgccgagttctgcccagggattctgcagaagccggggtttctaaccactgtgctccttaggcaacaggctatgggagtgtgttattctaccccggctggtgtccaccaagaagcaaatgcctccacacagcaggtgggtgccggctaagacgccagcccacttcagcagctcccatccaggcaacgcaactcaggtccaactttccatttctcagcacagacaggtctttcttgcctcagagctcagatgtgcacagccactgcatacccgcgggagttctaatttgtgcacggaacagtgactcatatgggacctcaaatttaaaccaaccatatacctatgattccccatgtaaaaaaccctaggaaaggcacacctactcaagcggcagaagcggatcaggggatcccagggctgggtttataggtagagacagacccatgtggggctggggtttatgagcggagaccgacccaaggaacctacggagtgatgaaaatgttccgtgtcttgtctgtgatgatggtggttacgtggtacgtacatcagtcagctgaactgtgtacctttgttccgtgccttgtctgtgatgatggtggtaacatggtacgtacattggtcagctgaactgtgtaccttaaatgcatgcattttacaatatatacattatgcctcaataaagttgatgcttaaaactttaaaaaagggactgtggccaggcgtggtggctcacccctgtaatcccagcactttgggaggccaaggcaggtgaatcatgaggtcaagagatcgagaccgtcctggctaacacggtgaaaccccatctctactaaaaatacaaaaaaattagctgggcatggtggtgggcgcctgtagtcccagctacttgggaggctgaggcaggagaatgacgtgaacccaggaggcggagcttgcagtgagccgagatcgtgccactgcactccagcccgggcgacagagcgagactctgtctcaaaaaaaaaaaaaaaaaaaaaagtgattgtggccagacatggtggctcacacctgtaatcccatcactttgagaggccaaggtgggtggattacttaagccctagagttccagaccagcctgggcaacatggaaaaaccgcatctctactaaaaatacaaaaattagccgggtgtggtggccggcgcctgtagtcccagctactcaggaggctgaggtgggaggatcacttgaacccagaaggtggaggttgcaatgagctaagatcgcaccactgcactctagcctaggcaacagagcgagactccacctaaaaaaaaaaaaaaaaacaaaaaaaaaaactgactgctgcacctggcacggcttcacgctgagacgggagctgtggcatggcagagacgggagctgtggcatggcagagacggggagctgcggcacggcagagacggggagctgtggcatggcagagacgggagctgtggcacggcagaggcgggagctgtggcatggcagagcaggactgcgggccaataagccaagcccaggatggtgtggacaccgcagatacaacaatgtacaaagtgccctgtgtgtgccggcatctcggatccttttgggaacaggaacataagcggcagaggccactggtgactcagtctaaactggggcgggagttttgaggtgaaggaaattcactgataagtgaggccttagagagggcaataagcagaggaaactgaggctcagaggagctgactgactccgggaagaatgcctgttttgtgattccttatccgcgtgtatccgtgtacattcaaatagcaccagacacagcaaagggccagagctgagataacagccatccggccgggcgcggtggctcatgcctgtaatcccagcattttgggaggccaaggcaggaggatcacggggtcaggagatcgagaccatcctggctaacatggtgaaaccccatggctaatacaaaaaattagccaggcatgctggtgggcgcctgtagtcccagctattcgagaggctgaggcaggagaatggcgtgaacccgggaggtggagcttgcagtgagccaagatcgcaccactgcaccccagcctgggcgacagagcgagactccgtctcaaaaaaaacccaaaaaacaaaaaacagccatccaagacaggtgtctgattacattcgtctctggctcttttccatcctcccccttcctcccccttccctgtctcttcaccacaatctaaaaagctgagcaaatcagaaaatacgtcctaatctcaaacaatccaggcctgaattgggacatcccccagtatttacagcaagaagaggttttcctcagctccccttcagacgattaaaggagtaaatgtggctgggtgcggtggctcacacctgtaatcccagcactctggaaggccaaggtgggcgcctcatgaggtcaggagtttgagaccagcctggccaacatggtgaaaccccatctccactaaaaatacaaaaattagccgggcatggtggcgggcacctgtaattccagctactcaggaggctaaggcaggagaatcgcttgaacccaggaggtggaggttgcagtgagctgagatcacaccactgcactccagcctgggagacaagagcaagactctgtctcagaaaaaaaagaaaagaaaaaaaatggatgtcagctacctacagaaaaggggcccagcacttcacggcacgactgacctgtctgcactaacgaagatgatctcgaagttctggcctgcctccttgatcttccggtaggattccaccaggacccgggtgaggcttcggcagggcggacactgaaagacaggacagcaagacccgctgcgtcacgctgcttctccacctcccagccactcaccatccaaggccgggttagcaggactcaagcaggactgggacagcaaaatcccgttcatgaaaggggtggaaatgagatgggtatggtggctacctgggaggctgaggtcagaagatcgcttgagcccaggagtttgaggccagcctgggcaacacagcaagacctagcctcctgcatgaggcaaaaataaacttgcctctcttaatggtgggcatctggcacaagcacccgcattgtccctatgcagtgtgtgagcaggtagcatgaactcatccacatggattgagagaaatatccaggctgggtgcagtggctcacgcctgtcaccccagcactttgggaggccaaggtgggtgcatcacctgagttcaggagttcaagaccagcctgaccaacatggagaaaccccatctctactaaaaatacaaaaattagccgggtttggtagtgtgcgcctggagccccagctacttcaaaagctgaggccgaagaatcacttgaacccgggagacagagggtgcggtgagttgagattgtgccactgcactccagcctaggcgacagagcaagactctgtctcaaaaaaaaaaaaaagggggccaggcacgatggttcatgcttgtaatcccagcactttgggaggccgaggcgggcagatcacctgaggtcaggagttcgagaccagcctggccaacatggcaaaaccctgtctctattaaaaatacaaaaattagtcaggcgtggtggcatgcacctgtaatcccagctactctggaggctgaggcaggagaatcacttgaacccaggaggcaaaggttgcagtgaactgagatcgcgccactgcactccagcctgggtaacagagcgagactctggctcagaaaaaaaaaaaagagggctatcgttatagatcagtcaaagaagtcatttcttgctgcttttttcattcataatcataagcactattcaaccaggcctcgggcacaggagaaggccagaaggccgggaaattcctgcctgggtgtctcacccccagaagccaaccacagctgggcctgctgggaacatcactgcttccttctgtctgagccaaagggggtccaaacactcacccaatgtgcggagaaatagacgcccacgtgagacccctccaggctgctgctctccagagactgcccattgtttctaagcaagggccctgcaatgacttccctgaagggtttcggtccccaggggaactccagacctgaaacagaaaacagatggtaaaagagggcttagacccttcttgatgacctgggacccaggagacttcagagcggttaagactcttcttgatgacctgggacccgggagacctcagagcggcaggcgtgacaagataatcatcaaacagtacttgtcaacacacctacagcgtctgcagctaacacaggaatcaaactagagccattccctgccctcctggcaacggttcccaaacctggatgggtcacaaggtctgtcttccagggacatttttttttttttttttttttgaggtagagtctcactctgtcgccccggctggagtgcagtggcgcaatctcagctcactgcaagctccgcctcccgggttcacgccattccccggcctcagcctcccaagtagctgggactacaggtgcccgccaccaggcccggctaatgttttttttctatttatttttagtagagatggggtttcaccgtgttagccaggatggcctcgatctcctgacctcgtgatccacccgcctcagcctcccaaagtgctggaattacaggcgtgagccaccgcacctggcccttccaggggcttttgaaaagtacaaacgcccaggccacatcctgaggctggagacccaggggcaacgcaaagatgtacgtgcaaaatgaaacaggctccccagaactgacgagggactcggtttgggaatcatcgcctcggggcctcgggaatcaacccgatacccgggattgtggattcacatcccggccgtcacatcccagcggctgtcagctctgactgtacttggaatcagctggggagtttaaaataccacgctcctgggccccacgcccagagattctgattctattgctcttgatgggctcagggagccaagtgagaatttaagtctaataaaagaaaagagtaaaacccacccagcccagatggtccatgttctgatgacacctaagctccaggtagggggagttgagaatacgcttcccgctcaactgaaccacgttttctcacagggtggtccaaggacctgctgcctcaaagtcgcttgggggctgggaaggaggagcacaggctggttgaaaatgcaggtggtcgggcctccccggaaacaagagggatccacaatgctctggaggtcgggctcgggatccacacggggaccaggctctgcggctcagccccacgatcccagcactttgggaggccgaggtgggcggattgcttgagctcaaaagttttgagaccagcctgggcaagcctagggagaccccgtctctacaaataataaaaaattagctgggtgtggcggtgcacgccagtagtcccagctacacgggaggatgagttgagctcaggaggtcgaggctgcagtgaaccgggatcatgccacagcactcggcctgggcgacagagggagatagtgtctcaagagaaaaaaaaaaaaaaaaaagaaaagcttcacgcttggttccaccatgccgtggtttttactgaggacaattctttgaagtaggtggcatttttactgggaaaatgtgtgagcggggttgaatcttctcactggacggattaagtgaggggaggagatctcacagccctgttctcactcactgccagagggaaagacgccacgcggacggccctgagcggggcggctggaggagcacagcccacgcgtagccagcaagaccaaggcccgcagggagtgacagctccaagcaacgaggtgcactcaccgccaaggccaggagagtgacacgggggctgggacttcgctatgtaatgttttaaagaggaaaaaccccactcagcctgcctctaactgtgaagggggcagccgccacggatgcagcactagaggccggggtctgagctctccgctttcccacagcctctgcggccctccaagcggagcttcttacggcagagtccatctcttttggcccatgaattaaagcccctaggagggacattctgatccctgtgaaaatcttaaaaccatgtcctagggaatactatgatttcaccaagacgacattctctaccacgtaaacccacgtgtatctatttcaccagtactctctccaccggtgggacggagattagcctaagggcatggaggagggagggctgggtaataagaggaccatatgcacgggctgaggttttaccttctgggtcatctcggatcaccagcagcccgttcctgcacacaaccttcccagtggtggcgtcgaggaatattagtgatggaatgttggaaattcggtatttgttccaaagtttgagctgtatgaagaaaagcaaaagaaggtggttaagtccaaaccagattcattgcagagttcttttgagccccttaggtctggaggctggatgaacaggcaagcattcaagcacacagaaaagaataatggatgccaagcagggctgctgggcaaaggggcacgttaactacaatcccactgccccccggggtctgtgacagtgcggggggctccgaggagggaggtgatggtcccactgccccccggggtctgcgacagtgtgggggacttggaggtggaggctgatgaccccactggcccccatagtctgcaacagcataggggactcagaggcggaggctgatggaggaccacactcatcctggagagtactacccttccacgtctctaaaaatcacaaagatgaagatggattccacatcttcagaacacaatcagaccaccaggtggttaaggaaggaagggaaggttttcacgagagcctcgccaccctggcagcaggcaacagcagccgctctccacggccccttcccctcaagggagaagagacgggttttctgacagaaggccacggagttaacatctgccccctcagcccttcaccaggtccctcagcccttcaccaggtccctgcacttgaaatatcacagtcgtcgttacgttcagcccacaaagcaccagggaagcaatgcccagggccagccccaaccctcggctctcggtgccgcgtaaaacacgcttcagtctactgtcagattcttgaggttggctgtgcacacggtcagaggtccagggtctaagaggaataaagctgacaaaatgtcaatgcaaagcccagggctggaagccaagcgtgggcggcctctgttcgccatcggggtgaagcctcctgtgttcgttcactgccgtcggggtgaacgccatatgggcaggtgactgggtgctctcgaacctccccgccaagcccaaaaagccacataattaaatgcaatgtcggggccgggcacggtggctcacacctgtgatcccagcgctttgggaggatcacctgaggtcaggagttcaagaccagcctgggcaacatggtggaaccccgtctctacttaaaatacaaaaattagctgggcgtggtggctcacatctgtaatcccagcactttgggaggccgaggtgggtggatcatgaggtcaggagatcgagaccatcctggccaacacggtgaaaccccgtctctactaaaaatacaaaaaattagctggacgtggccgggtgcggtggctcacacctgtaatcccagcactttgggaggctgaggcgggtggatcacgaggccaggagatcgagaccatcctggctaacacggtgaaaccccttctctactaaaaattacaaaaaattagccgggcgtggtggcgggcgcctgtagtcccagctactcgggaggctgaggcaggagaatggcgtgaacccgggaggcggggcttgcggtgagccaggatcacaccactgcactccagcctgggtgacagagtgagactccgtctcaaaaaaataaataaataaaataaatgcattgttgggctgtgttcctccagaaaagacagaagcagggaagctgcagagtgccccactgtttaggccgttcggctctgagcctccctgctgggggcttgagggtcccggcaggaaggctacgcccttgggcagaacagggcaaggatgtgtggcagccaagcaggcatgagaagggcagcagcagagggaagagggcattggtggtgggatgaggattgtcccgagttccatccgaagcggtgaggggcagggcaggggatctgccacacaatgctgggcttccctgtctgtggagacctgtatcttggcaggaagggctgtgggaccccacttcaatctgggtgggccctgctttcaatctgcatgtttttcccagccccacctttccggggggcttacaaaaccagcccgggacctcacaacaagaacaatcctgcacatccagttttttttgttttttggttttttttaaacagaatctcgctctgtcacccaggctggagtgcagtggcacgatcttggctcactgcaacctccacctctcaggttcaaacaattcccctgcctcagcctcccaagtagctgggattacaggtgccccctaccacacccggctagtttttatatttttagtagagacggggtttcaccatgttggccaggctggtctcgaactcctgacctcaggtgatccacccacctcggcctcacaaagtgctgggattacaggtgtgagccaccgtgcctggccttttttttttttttttttaatggagtcttactctgtcacccaggctagagtgcaatggtgtgatctaggctcactgcaacctccacctctagggttcaagcgattctcttgcctcagcctcccgagtagctgggattacaggcacccacctccacgtccagctaatttttctattttcagtagagatagggtttcgccacattggccaggctggtctggaactcctgacctcaggtgatccacccgcctcggcctcccacagtgctgagattacaggcgtgggccaccgcacccggccccagtttttaaattccacgatggcatcattccagagaaacttggtacagaattcagattaaacatccttaagaggttcaacaacagaacaagaccatcctgccacggggatcagcttcataagtttgctgtacaaggactgagtcaggttaattttttttagaaaaggaagattaaaatgattgaatttttctggtttaaaaaggaattcttggagaaaaaaaatcactggaaaaaagtcgggaaacagcaaaaccacacaaattgggattgaaaattacccatgactcaccgctcaggaaagctcagaccgttttatatttttccaccagtggcaaatgagagagcccatttcccaaccttcaccaacattatcactgtcattcatttttccagttcgctagggggaaaaaatgacaagtcatttttgttgcttatccttttttttttttttaggggggcggggtggtggggcaaacagagtctcgctctgttgcccaggctggagtacagtggcacgatcttggctcactgcaacctctgcctcccgggttcaacgaattctctgcctcagcctcccgagtagctgggattacaggcatgcaccaccttgccggctaatttttctatttttagtagagatcgggtttcaccacattggccaggttggtctcgaactcctgacctcaggtgatccgcccacctcggcctcccaaagtgctgggattacaggtgtgagccaccgtgctcggactatctttttttttttttttttaaagttctgggatacatgtgcagaatgtgcaggtttgttacgtaggaatacatgtgccatggtagtttgctgcacccatcaacctgtcatcaaggttttaagccccgcatgcattaggtatttctcctaatgctatccctcccctaggcccccacctgccaacaggccccagtgtgtgatgttcccctccctgtgtccacgtgttttcattgttcaactcccatttatgagtgagaacatgcagtgtttggttttctgttgctgtgttagtttgctgagaatgatgtcttccagcttcatccatgtccctgcaaaggacatgaactcattcttttttatggctgtatagtattccatggtgtatatgtgccacattttctttatccagtctatcattgatgggcatttgggttggttccaagtctttgctatcgtaaacagtgctgcaataaacatacgtgtgcatgtgtctttacagaagaatgatttacaatcctttgggtatacacccagtaatgggattgctgggtcaaatggtgtttttggttctagatccctgaggaatcaccacactgtcctccacaatggttgaactaattgaccctcccaccaacagtgtcaaagttgcttatctttgacttactgatgtgtaggagatacgctgttgtcagcaccctgtgctttccccgctatgttttgtaactggtaagagctgaaagtgattcagcagatattaagtgagcgcccactgtgtgccaggctcgttctaagcacaagagattcagttaagagcagatgaggctgctaccctcgtggggctcctcctccagtgggagaggcagacaataaacaagaatataaacaggaaactcatttcagacaccgagaagtaacagaaagaaaacagggcgggtaagatcacggctgcaactgggaagctgggatggcagcgtggattccagagacaggcgtccgggaggaatgacatttgggcacagacctcagcaaggaaatggaacaagccacaggcacgccgcgggaggccacctgaggcccaagagcccgtgtggaggctgactgcgaaagtctgagtagatgagagaaccaggggcggcggctgtgatgaggtcagagatcatcataagatttgtgaaccacatcgtcaaggccccgtggacgacagcaaaaataacaggtcacagggaatgacgtgacctgattcacagtttaaaaggccatttggggccgggcacgatggctcacgcctgtaatcccagcagtttgggaggccaaggtgggcagatcatctgaggtcaggagttcgacaacagcctggccaacacggtgaaagcccatctctactaaaaatataaaattaaccaggcatggtggcaggcacctgtaatcccagctactcagagggctgaggcaggagaatcacttgaacccgggaggcggaggttgctgtgagccgagactgagctattgcactccagcctgggcaacaagagcgaaactccgtctcaaaaaaaaaaaaaaaacatgctctaacctatgctgattgggttactccagaaaagaaatttgagagcgaaaactgcaagaacaatgtgcttgaacaggaaaaagggcgagacctagatcacaaatggaaaagggccaggttataaaaacagctgacttttcaatgtagttgccccttggctgggtgccgtggatcacacctgtaatcccagcacttagggaggcaagggggagcggatcacccgagcccaggacttcaagaccagcctgggcaacatagtgagacccagttctccattaaaaaaaaaactccacaagtctgaagtatacaagaggatgtatataggttatatgcaaaaactatgccattttatatcaaggacttgagcactggggaggtgggtcttggaaccagtccccccgccacacagatactgagggccgactttatttattcatttatttatttatttatttatttattattttgagatggagtcttgctctgtcacccaggcagtgcagtgacacaatctcagctcactgcaacctccgctcactgcaacctcccctcattgcaacctccacctcccaggttcaagcaattctcatgcttcagcctcctgagtagctgcgattacaggcattcgccaccacacctggctaatttttgtatttttattagagaaccggattcaccctgttggccaggctggtttggaactcctgacctcaggtgatccaagcaccttggcctcccaaagtgctgggattataggcatgacccactgcgcctggccttccataactttttgatcaaaattttatcaggaatggatggctactgattattctttgaacctgttgtggtatatttcatgagtgtccagtctaagattaaactatccttgccttcttagaagagatcctccttactcacatgtattattaagggatcactaggatcttatgttctgtggggcttggggctcccacaagcaaatgccaccttgtaacaggaatctctctgtgggtagctggactgttgcctgaagtaaatttcagcctgtggtcctcaaatgtaaagctagcagatgcaacatgattattagagtggtttgcatttaagcacccctattacccttcaaacgtaagcatgtgctttgctcttagccaggaatttttttttcttttttgagatggagtctcgctctgtcacccaggctggagtgcagtggcgcgatctcggctcactgcaagctccgcctcccaggttcacaccattctcctgcctcagcctcctgagtagctgggactacaggtgcccgccaccacacccagctactattttgtattttttttttttttagtagagacggggtttcaccttgttagccaggatggtctcgatctcctgacctcgtgtccgcccgccttggcctcccaaagtgctgggatgacaggcgtgagccaccatgcccagcctcagccaggaatttttaaggaaatggtggtggggttttggtacctgaacagcctctaccctctaaatgctcaggagaaacgccatctcccaaaccttgccagctaaagaagaaccagtttcttctgaaactcttatgtgagtagaagagttgtaacacctctccctgccctgcccccagtctccacagacatgtctttcctctcggaatcctctctggatgggtaagaaactgtaacctgcatcttccctccctccctaaagattccccgttcctttctggttgcatctcaggagcacaggaggtctctgcttgtgttttatccatttactgttgggtctttgtttccacgtaaaggcccacgctgggttagtggggaaaaaatttccttctagactcacatctgacgctttttatttgtttctttgagacggagtctcgctgtcccccaggctggagtgcagtggcgcgatctcagttcactgcaagctccgcctcctgggttcacaccattctcctgcctcagcctcccgagtagctgggactacaggcacctgccaccacgcccagctaattttttgtattttttagtagagacggggttttaccgtgtcagccaggatggtctcgacctcctgacctcgtgatccgcccacctcagcctcccaaaatgctgggattacaggcatgagccaccgcacccggccgaaaagttatttcttttacagacaaagccatcgtggtctaatttatccaggaacccatgtcattcattagggagctgcatctgtgggcgcctcaggccacccaaagcatgaaggttactcggctctgaaacaatgtggtctgcacgggagtcaccattccgaaaaacacacgaatcagaaggcgacccttctgtcagagaagtcatccaggagtgacttgcggattcacttacgcagcccggaaaccaaaaaatgcttcagcttaaagaaatgatcagcaagattcacctctgcaccctttcaagtgtgaggggcccctcgagtccaccaaaggttttcaaaatgcctctgaaaacagcggtttcatagtcatttttgggtcacagacagttttgaggacaaaagctatggatctttcagcagagaaaaaggcacatacagcaaaaagtcagtgtataaattcacagagttcataaatccccctgaagcctgttagcggaaactgatcacgggaggtctacagaccccaaatgaagacctccctgtcttaagagttcatgtcagtgcacgtcttgaccttgattcaactgagagagagataatcctgccccatctgtatcctgctgtaaacattcctccaatgtagtcaggatctgccgaaaacctaagatgacgttaacagtgaagagcgggtgattaaaaaagaaaaaaaaatctcactctccccgctctcccactgtcgctgtgttcctaaactcaggcagagctcatgccttcaggatggcgaacatcagagccacccaggactgagagaactcactgtcctttttaaaaaagcatttctcagggccaggtgcggtggctcacgcctggaatcccagcactctggggggacgaggcgggtggatcgcttgagcccaggagttcaagaccagcctggacaacatggtaaaaccctatcactccacaaaaaaatacaaaaattagccaggcgtggtggccactcctgtagctccagctgcttaagaggctgaggtaagaggatgctttgagcatgggaggtcaaggctacgatgagctgtgatcgtgtcactgcaccccagcatgagtgacggggcaagaccctgtctcaaaagggctgcactgtctggcattgcagcagctgggaaagaccagatgactttacatccagtgtttgctctgtctagagatcatcctggcaacgtatccacccagggtgcattttgttagtcttgctctgttgcccaggctggagtgcaatggtgcgatctcagctcactgcaacctccacctcctgggtttaagtgattctcctgcctcagcctcctgagtagctggaattacaggcaccaaccaccatgcctggctaatttttgtatttttagtagagattcaaacctcctgaccttatgatccgcccaccttggcctcccaaagtgctgggattacaggcgcccaccaccacgcccgacctaattttgtatttttagtagagatggggtttcaccacgttgggcacgctggtctcgaacctcctgacctcaagtgatctgcccgccttggcctcccaaagtgctgggattacatgtgtgagccactgtgtctggctaatttttgtacttttagtagagacagggtttcaccatgttggctgggctggtctcaaactcctgacctcaccctcccaaagtgctgagatgacaggcgtgagccaccacgcctggccccagggtgcattctcatgatcccttgctgaatggtcttctaccacagccacccaaaggccacacaatgccaacagaaaacgtcacagcaggcctggcgcggtggctcacgcccgtaatcccagcactttgggaggccgaggcgggcggatcacaaggtcaggagatcgagaccatcctggctaacatggtgaaaccctgtctctactaaaaatacaaaaaattagccgggtgtggtgacgggtgcctgtactcccagctactcgggaggctgaggcaggagaatggcgtgaacccaggaggcggagcttgcagtgagctgagatcgtgccactgcactccagcctggaagacagaccgagactctgtttcaaaaaaaaaaaaaaaagaaaacgtcatagcaaacccccaacgcctacaactctactgtttatgattagttcatcaaattcagaagccaggccacagagaacaaagaaaaaaaacaaagaggagacaagattagctcaacttggcaaaaatggaaacggatgacaaagtgggttatccagttacttgaaagttcccactgctccgcctggcagtgggttctgctgaaagactccaaggctgtggttggaactatcctaggaatgcaggccagaaacgcttctacagtgaccaacaaaacaatgaaacacatatcaaaagggacgggactgggaaccgggaaacggtaaaaatgccaacgagaaagtccagcaaatctgaaacaccggtgggattcgtcagcctcatagaggccgcagggaaaaaacaccggtgggattcgtcagcccccacagaggccgcaggggaaaaacaccggtgggattcgtcagcctcatagaggccgcaggggaaaaacaccggtgggattcgtcagcctcatagaggccgcagggaaaaaacaccggtgggattcgtcagcccccacagaggccgcaggggaaaaacaccggtgggattcgtcagcctcatagaggccgcaggggaaaaacaccggtgggattcgtcagcctcatagaggccgcagggaaaaaacaccggtgggattcgtcagcccccacagaggccgcaggggaaaaacaccggtgggattcgtcagcccccacagaggccgcggggaaaaaacaccggtgggattcgtcagcccccacagaggccgcaggggaaaaacaccggtgggattcatcagcccccacagaggccgcagggaaatgcagcctggtgatttccgagaagtcccagttcccgagagcaacatggaatctgcccccgcatgctaaggaccaggtcttgctcttgactggggagcctcagcttttctttccaacagctgctgcaaatctgtgggatcaaggcaaagccaacgcagatgtaggattcatccgcaaactccttggccaggtcagccaagccttctcgggcaaacgtcacccctgccctccagccaaatgccgaccacaatcaaaaccatcctttctgtgagcagcatttgaaaacagagccctaaatgtgctctcaccctttctaaccccaaatgaccaaacaccatgatatacactgagagcaggaatccccctcatcccagcctccaatgtcacaccaggacgaacactgaggttactcagcacaggttccggctccagagcccggctcttccatctgttccagccgcttattagtgggtgaccctggtgaggtatctcaccgtctcttggcttcctcagctgcaaaatgtagataacagaacctacacctcactgaactgctgtgaacatgagttacatagagcgcttagcataaagactggccaatattaggtatgaaataagtgttagttgctttaagctaaggcgctgacacagacaatgggtctcattctgtggcccaggcaaaatcatggctcactgcagcctccacctcccgggctcaagccatcctcccacctcagcctcccagagtgctgggattacaagcgtgagccaccacacctagcttagttgctattattattattattattattattattttctagacccagagtcttgctctgtcgcccaggctggagagcagtgacacaatcatagctcactgcagcctccaccacccgggctcacgtgatccccccacctcagcctccgaggagctgggactacggtcgcacaccaccatgcctcactaattttttgatgttttgtggcaacagcgtctcgctatgtgccccaggctggtctcaaactcctgagctcaagcgttcctcccatctcagactcccaaagtgctggggctacaggtgtaagccactgtgttcagcccccatgccatcttctaaatgctccagcaggaccttgtcctcatatccccagaggtaaggcccagtcttggatccccttgctcctgaggcatgattcccagtgtgtgatttggcccatgactgcaatcctcagagcctagtatacctgctggccaagagcagtgcctgggcacattatgtgtccaataaatgatagatgaacaacaaatgaacagaggaagggagagaggaatcaccgtcctaggtcagccagaacagatgccccctaatcagtccagctcagctacttaatggctttttcatgaccacggctcccccttgttcctggggggcccagaatgctcctgaaatggcagaagaaatgattcgaatccagcgctggtgggatcagagcttctctcgctttgcccgatggtgccttagatcctgtaccctccccacctgcgcattctgccttcgcctggagctgaagcagagaacagaccagcccgtgtgaccaagggaaaggggccgggggtccgggccaggctgatccgagccgtcaccaacctatgagaattccaaaccctcctggtggctctgccattttgatgctacatgttttcagctggttcacagagaggacctatgcatgccccaaggatggcaagagcgtgaggttcacaaaacaacatgtccactctgattcctgcagacaaagccaccgagcatgatatatgccgcacacgttctttctgggtccttctctgccacgccaggctgcattaaaataaaaagactgggtagaaggggatttaaaatctatttttcatctctctaaatctcagaacactgaattttcctttccttctttttttttttttttttttttttgagatggagtctcgctctgtcgcccaggctggagtgcagtggctcgatctctgctcaccacaacctctgcctcctgggttcaagcaattcttctgcctccgcctcccgagtagctgggattacaggtgcccaccaccacacccggctcattttcgtatttttagttgagacggggtctcaccatcttggccaggctggtctcaaactcctgacctcaggtgatccgcccacctcggcctccccagaagctgggattacaggcgtgagccaccgcgcccggccataacagtgaattttctaaccaatttacagatgacctagctgggctttgcaacccgacagagctgaatcagctgtgacttacaacactctaatcaaagtgccacagggatgaaagtggtgagacgccgagtcggctttcaaaaaccttacagtttagaagtgggaaacggtgaaaatggtaaactttacgttacatatatttggccacaatataaaaatatgaagcaacaaccacatatggcagatcaggccaactgccaggagaaatgagcaaaagaaggcccaggaggaagagtggctgcattctggttgactagagctgccaggagggccctgaatcttcaaacacactgaactatctcaaacatccgccctacagctgcctcccttccaaacgggggccgctccaagaacccaccgttccgggttgagtttggtcctcactggtcagtgaaatcttcagtcgatacctgtgtttgctggaggccgtgtgggatagatcaaacggtggagaatgtggttctggagccaggctgcctgggttcaaatccccgctctgctatgaaccaccaggggaactccagccacacacctctcggagtgtcactttcctcatgagtaaaatgaggataataacaacactgcttcgtcctgttgctgtgagaactggattaatgcacgtgcggtgctgacaacactgcttggttcatagtgagcgtcaggccggacgcggtggctcacgcctggaatcccagcattttgggaggccgaggcgggcggatcacttgaggtcaggagttcaagaccagtgtggccaacatggtgaaaccccatctctcctaaaaatacaaaaattagctggtcttggtggcaggtgcctgtaatcccagctactcgggaggctgagacaggagaatcgcttgaacctgggaggcggaggttgcagtgagccgaggtcacaccactgcactccagcccgggcaaccagagtgaaactctgtctcaaaaaataaatttaaaataaaataaaacataggaagtgttcaaatacatgctagaaataatgaggaggaggatatctgaaaagaaaaagtgccaggtatgcacggcagctcacgcctgtaacttcagcactttgggaggccaaggtgggtgggtcacttgagctcaggagttcgagacccctgggcaacatggtgaaatctcatctctaaaaaaaaattagcctggcatggtggcacacatctgtagtcccagctacgcaggaggttgaggcaggaggatcacctgaacctggtgtggtcaaggctgcagtgaatcgtgatggtgccactgcactccagcctggcgacagagagaccttgttaaaaaaaaaaaaaaaaaggccaggcacggtggctcacacctataatcccagcactttgggaggccgaggcgggcagattacctgaggtcaggagttcgagaccagcctggccaacatggtgaaaccccgtctctattaaacatacaacaattagctgggcaaggagacaggtgcctgtaatcccagctacttgggaggctaaggcaggagaattgctttaacccaagaggtggaggttgcagtgagctgagatcgtgccactgcactccagcgtgggcgacagagcgagactgtctcaaaaaaaaaaaaaagagagagagagagaatattaccatttctactggaccataaatggaaaaatatgatgttccctgtaacccccatttagcacccatgccagcagcaggctcccattctggtggagggagaatggggaaatgacttcttaggtctcctatcaacttgggatacctccagatagaaggaccaggggacaactgtacacaggaaatgccggttactctcagcctggtgtgcagagacttctttttttttttcttgagacggagtctcgctctgccgcccaggctggggtgaagtggcgccatctcggctcattgcaagctccacctcccgggttcacaccattctcctgcctcagcctcccaggtagctgggactacaggcgcctgccaccacgcacagctaattttttgtatttttagtagagacagggtttcaccatgttagccaggatggtcttgatctcctgacctcgtgatccgcccgcctgggcctcccaaagtgctgggattacaggcgtgagccaccgcgcccggccggcgtgcagacttcttacgtcttaagagcctcacttcaccggcgagatactcttttacaacagaaatcactttgctgctagcgtgacaggcagaggatccgatcggctgtgtcctccttttctctctttatctgagagatgtgtgtccatggcaagccggcttccatcctaacctgttgctccaaatgctgtcaaacacacagacgactcccaggataaaggacggcacaccaagcttctcttagggtgaacacaaaacaaccactgcccccacaagcctttctccaagggggccgctgtgttctggcagcccccactcctccaccgcacggcggcgggaggcagagtgtagggtgagagtgccggcacaggagcagatggcttgggttcgaatcccggctctgccactttgggtaaatgacttagtctccccacacctcactctcttcagctgcagaatggtctggggggcacctccctgctagggttactgtgtggatagatcgtaggcacgaagggcttggaaacatccctggctcacagttagcactcacacgtgaatacttctcatgtgggcccttccagatgctacttcagaaagtccatgccagggcaacaggccccgcatgcggccctcacgctgcaggggcgtcaaagaggcagcactggactagatggtgatgagaccatcctggtgccgccaaccctgccagggctgggacccagagcagcccacacacggtgcatctcacgccggcgagcaggtcccccctgaccacggcgcatctcacacgggcgagcaggtccccctgaccacggcgcatctcacacgggcgagcaggtcccccctgaccacggcgcatctcacacgggcgagcaggtccccccgaccatggagcatctcacgccggcgagcaggtcccccctgaccacggagcatctcacgccggcgagcaggtccccccgaccacagagcatctcacacgggcaagcaggtccaccctgaccacagcgcatctcacgccggcgagcaggtccaccctgaccatggcacatctcacgccggtgagcaggtccaccctgacaaaggaaagggagagcccaggagtgtccacttccagcagtggctctgggtgcggcaaaggcacaaactggacaaaagcagcaatccttctgattaaacctgttctacatccttccaattacacctgctctaggtggcgcacggcggctcacgtctgtaatcccagcactttgggaggccgaggtgggcggatcacctgagctcaggagttggaggccagcctggtcaacatggtgaaatctgtctctaccaaaaaggcaaaaatgagccgggtgtggtggcgcatgtctgtaaccccagcaactcaggaggctgcggcaggagaatcgcttgaacctgggaggcagaggttgcagtgagctgagatcccgccattgcactccagcctgggcgacagagagagactccctctcaaaaacaaaacaaaaaacctgctcgacacccttccaattaaacctgctcgacatccttccagttaaacccgccacttcatcaaggaaagaaagacattttcccggctagcactgatctgtgggcccttctttttcaaaatgggagatggcagaattttatacagaaacagtcgctagttccaaccagaaagcccagagacacaggggagccgctggtggccacacaggtgaagcatgaaaggctaagaaatggaaatgcagtgctgcacatggccgggagcccgggtccggctgtgggctgcagttccgtgatcccggcggggaaggccacgtgggttactggggaggatgaaggatgaacacggggccgcgtctcacatgcaacccaccttcgaagacgccaaccagaggcacctacggcacatcccgagacacgtgggggcccgtctcctcctccttccaggagtcactccccaggcaacttggctactaaacttccgttcagaaagtgcaccttcagggcagggtgcagtggctcatgcctgtaatcccagcactttgggaggctgaggcgggtggatcacctgaggtcaggagttcaagaccagcccagccaatatggtgaaacccccgtctctaccaaaaatacaaaaattagctgggcgtggttgcacacgcctgtaatctcagctgctcgggaggctggggcaggagaattgcttgaacctgggaggcggaggttgcggtaagccgagatcgcgccattgcactccagcctgggcaacaagagcaaaattccgtctcaaaaaaagaaaggaaagaaagaaagagagaaagagagaaagagagaaagagagaaagagagaaagagagaaagaaagaaagaaagaaagaaagaaagaaagaaagaaagaaagaaagaaggaagaaagcaagcaagcaagctgcaccttcagactgaagtcaatgaacaacaacaaataactgaggttaaaataatggccacgaatgaagagacaaacacactgatgtttacttctcaccctttcaaatgtgccgaacgcaaagtatttaatgacgcccgttggctgctggcgtggggagtccggttccccgacacagggaacgcgatctcatctgtaacaccaattaaggaggttcattgactgtgccattcgacttcctgccctcatggctccgcgagccaggagatgagcagttagctgggagcacaaacggcatatggctgccaggctctttctggccgacaccacagacggagggaaaggctgtttcccccatgctgcagctctcgcaagctgacagaagggatttcctaaagccccatctggtatgaaagcctccactgggcagagtggtttgggacagcaagcgggtggctggtaataacaggctagggccatatgtgctcaggagagatcttaagaagcggctgggagtttgcataggagggggagtgaggagccagcgtcgatctggagtcaaagggaccccatcccagaggcagtcacttctagtgggggatagggtttctgtggcttgcagccttgtggatctccctgctgacattactaggaaagagctcagatgtgccacgctcactctgagtagcacctttcgacgtgaacgttgggaccctgacctgcagcgtctttgggagatgggccatcacacgggttcgacccagaatgttaagttcattcacaaagagaaacaaatctgaacgttttcactccagatctttccagaacccgtgagactaagaaaaaagaacaaggaagaaaggaggcataggaatgaggactccgtggagggaaaacggtcattccctgtcgctttggggaatctgctgcaaaaacacgcctgtccaggccatcatacgtcccgtcccgcccctccttagctggaaggtggagaccaggcggtggagaccaggccattctacgtgccgtcctgcctctccttaactggaaggtggagaccaggccatcatacatcccgtcctgccctccttagctggaaggtggagaccaggccatcctacgtcccatcctgcctctccttaactggaaggtgggagaccaggccatcctacgtcccgtcccacccatccttagctggaaggtggcggccaggccatcacacgtcccgtcctgccctccttagctggaaggtggagaccaggccatcatacgtcccgtcctgccctccttagctggaaggtggagaccaggccatcacacgtcccgtcctgccctccttagctggaaggtgggagatgtcaccagttcaccctaaccccagcccatccactcctgtggctcggaacaagctatgaggcgatcgcatgtgaaggccaatgaaaggactttgcaaaaaatacaaatatatggtaggtttctacgtacaaggtttctttttttcttttcttttttttcttttttttgagatggagtctccttctgtcacccaggctggagtgcagtggtgcgatcttggctcactacaacctccgcctcccaggttcaagcgattctcctgcctcagcctcctgaggagctgggattacaggcacctgccaccatacccggctaattttggtatttttagtagagacagggtttcatcatgttgcccaggctggtctcaagctcttgaccttgtgatctgcccgcctcggcctcccaaagtgctgggattacaggcatgagccactgcacccagcctgttttttttaatgaaaacaaaaatccatgccaagatgcctgaaaacagacctacccccaggagacagggtcagtgcaggtgcccgaggacaggacaccagggctcatcccagcaccccagagctccaggctgattttctagtaatttccaacatagcacttgactgacacgtccagcacagactcacagcacgggagagaactcctaggaccagctgctacagtgagaagctccagtgagaaaggtcaacttcataaactatgggaacacgggaggtgatccactgaattgagagtgagagagaattccacccttctagagagaattccacccttctagagagaattccacccttctagaatcctaccatcatcaatcacccttacagactcaacatccgagagagaattccacccttctaaaatcctaccatcatcacccttagggactcaacatccaagagagaattctacccttctagaatcctaccgtcatcacccttatggactcaacatccgagagagaattccacccttctagaatcctaccgtcatcacctttagggactcaacatcagagagagaattccacccttctagaatcctaccatcatcacccttacaggctggacatccaaagaccatctcacctctccctcataagacgaggcccttcagggtctacatcttagaccactttgtatcttcagtgccttacacgtgagagatactcaataaatggggatgctgatgatgacagtcaggccaatcagctggatgctgatgtgtgctaccagctcctcacatttgacctggagacacagcctgagccataggcaggcggatattccattttcacacatttgtcatggttcctcagcagaaaagaaaccaggcaaatacgccgggtgtggcggctcacgcctgtaatcccaacacttcgggaggccgaggaggaggccaggcggtcaggaatttgagaccagcctggccaacatggcaaaaccccgtctctactaaaaatacaaaaattagccgggtgtggtggctcatgcctgtaatcccagctactcgagaggctgaggcgggagaattgcttggaggccagagaatcacttgagcctgggaggcggaggttgcagtgagccgagatcacaccactgcactccagcctgggggacagagcgagactgcatctcataaataaataaataaggttttaaaaattaggtgttaggaataatgctcacaattttaaggaaattgccaggcacggtggcttgtgcctataatcccagcactttgggaggccaaggcaggtggatcacaaggtcaggagttcaagaccagcctggccaagacaaccccatctctactaaaattactaaaattagctgtggtggtgggcgcctgtaatcccagctgctcgggaggctgaggcagggaattgcgtgaacccgggaggtggaagttgcagtgagccaagatcgtgccactgcactccagcctggcgacagagagaaattgtctcaaaaaaaaaaaaaaaaaagaaaagaaaaaagaaaaaaaattttaaggaaattgaacacacgaacaaaggacttttagcaaagcagttttatttttgcacagaggggtgcccctttggccagtcgccatgagagcacacctgaacaaaggggcacaaaagccttcattcctgacacaagtcctgcccctgtaccctttttttattggccggagtcgggtcttataatataaactaatcccagttggataaacatttgatttttttttagatagggtgggtacgttaaagaaaagtggagggaaaggggaaggggtgtctgtaatgagccagaaagttagtctttctttaaataaggaaaggaatgtgagctggtactgataacgcttggtactgtggcatgctgggcacttaacaaaggcgagaagggaaaaggagaaaaaaggagaaaaatggtgggggtggaggggtacaatgaattaaagaataaaagattgatcagattatttgaagagaaacctcatcatatcccacatagtcaaatcatctcgaaactttccgcagcttctggtagatgaggaatgtgactacgtagcgcctaccgccccaaatgctattataaattccaagtcggcagggtgagcttttccgtgtccgctctgcaaaatgaacagaagagcaggaagtgtggttggtgggaaccacggagatgtttgtcatctcggcaccgtccgtacctgtccccccgcggagccactagcactcggcacagctcccttctcaatttcctatttgattgttatttcacaagggctttttttttttcccttctcggctgcgtggaaagctctgtttcttggcagaactttccagtgcccagttataaaccccgtgttgatcactttcctgcttcaggaagtccccactgagccctgggccaaatgacaaggaggggagaggaaatatttacaatgatgtgagaaactcccagcctggaaaaagagatcaaagaaaaaagtcagaagggaccgttctgcacggagcctggcacgtgaaggctttctctaaattggcctggaccggtccacagcggtaatgtcacctcactgggaatccggcaagccaggcgtgtccacagctctgcaaacagcctcagccccactgccacggaccagccacgtccacagcaaaaggaatcgtgtccgacactaagaaactgtgaccacccagtaccaaagatgcctttatatagaaacggactgtggcttgcattctttccctccaccagctcctgaaatgaaagggttccgtcacacaatgaaataagtaacagcagggagagagagagaggggaggtaaattgtttggaaagtagaagacagggtggaaaagatgaaattcaagacagatgtgtgagacccgcaaacatatgtctttgaatttatgcatccaagtgattgatgtagaataagaaaaaacagctacaagcccaataaagaaataaatataggagtaaatacagaacaaagtatcacgttccccacttcttccagaccaacatcaattctcgtctctctttctgctacataaagttgttacaaaacggggcgagtgaaggatcgaagatgaaacactacgaattaagcagaggttctctgtggtccctgacaccctcaggaggacgtcaacccctgacgattcatttccaattactgaacgttgatttcctgttttgttttttttttgagacggagtcctgccgtgtcgcccacgctggagtgcaatggcacgatctcggctcactgcaacttctgcctcctggcttcaagcaattctcctacctcagcctcctgagtatctgggattataggcacccaccaccacgcccggctaatttctttgtatttttaggagagacagggtttcaccatgttggccagggctgggctcaaactcctgacctcaggtgatctgcccgcctcagcctcccaaagtgttgggattacaggcgtgagccactgcgcccagctgatttcttgtctctaaaaggtactgctacggcttaacacgagcaggatttaaaaaatagtagcatttgccaggttcgtgcctggtcattaagaaaaaataaagcaggaaatttagatgggcgtttccatcaaaacacaaagtccaaggctctggccggaaagccatttttacaatgcagtcagtattcgtgcatgtcactttacttccaaacagcgaactcaaaggggccaccacacgattggttccaaatgcctcctactgagagacacaggcagcttgcctcctggttaccttctctgtttgcagattcagaagctaacaagaaagcggacagcagcaggaatggccctggatgtcagatgcatcagacagagaggctgaagtgtggtctgaggacagatcgccaggggtggtggagatgacggaggtttttctggataggccaagtacctatccactgctcagcaggacgtcggctccataccacacatgtgcctggtcctttttcatcaataaacacttattgagcatctcaaacctaccaggcatttgtgccagacggtatggggtcagatcaagacaaaggtcttcgccttcgagaaaggaagggagcctgtctggtatgtaacaggctccggcttcctctctagaccctcccctgggacggcagtccccaccccacccacaccctttgttccacggcaggcaatcatggtgggtgtgcacgcttgatctaagaccaatcacgctctctcctggaagttcagaaagtggatacaaagacggattcactaagaccagagcttcccagctgggcgcagtggctcacgcctgtaatcccagcactttgggaggccgagacaggtgggtcacctgaggtcaggagttagagaccaccctggcaaacagggtgaaatctcatctctactaaaaatacaaaaattagctgggcgtggtggcaggtacctgtaatcccagctactcaggaggctgaggcagaagaattgcttgaacctgggaggcggaggttgcagtgagctgagatcgcaccactgcactccatcctggacgacagacaaaaaaaaaagatgggagcttcccaaccagcgtgctaggagcaggctccaggagggcaccgcactggccctctcagcctcaggggccgctggactccctcttccctccctccacgtccttgtcctctggcggccagctgcctcatccctttacctccgcagacaagcaatcatcatttcctaaacgtggcaggatgcagagcaggtagaggagtgctgaagagctgacagtggaggtgagaaccataaactcacgtcaagggcaggcaggggtcgccttgctgggccagggacagcagagagaaatggagctgacggagaggaggacagataaggaggggcaggagagacaccagagtcagagaggagcgaacgagagaagctgcagagcccccaaggagcccgagagcgacctgctcctgaaaccccaggctggtccctccgcatcccagctgggtgccgttcctgcatctggaggcccctgtgatgaaggactgtgttcggagagtctaactcaatccacctaaggcagctggagtccatttctgctcctcgtaaacaactcctaactaagacaggtacgtgggtctgtgtgtgtgcgtggagagtccaagcacatcactaaatcctcactgcttagaacgccagaaaaagaaaagcaaaatcacctgacggacgctctcagccctttcaaatccctttctcacggatcattcttctgtcttccccacgagccccagggcctggggaggagacacctgctcctgctcccacgaggtacgaggtacgcagaggaaggagcaagatgatgccttcagacaagggagcaaatgagcttcccggacctcctgcttcctgcagccagcagcccatttcttaagtgggagcctaagatacacaaacgtttcacatgtgtgtggacatgagaaaagtcagtccactgctccgacctgtgggtccaaggaaggtggccgtgagcaaactcacaaacttgccaagaaatgccattttgtgagttcccaaagtagggctcttcctctgggaaggttttgcaagctcactgtctccagtggggctggggggcacccagttttgctcactcgctctctccaggggggcggcgtgggggccccgggagctgagtcaggagggacgaaggcgggaggtttcttctgcagacaagatgaatggccacacgtcccttagagcacactcccgaggtagaatcacacacatgatattcagaagcaggcacagtacatcttccccaactttagttttcaaaggcagttcaatgagggggctgccgttggcggacactccccggccaggtgtgtgctggttccagatgccgccagtgccacagaaccaagacgggcagagggtggagtttctgaggcggcaacgagacttgaccttctcctccaggacagaaacgtcccagtgaatcagacccggacgatgccactactcacttgcttaggaaacttaaaactgctgaggccttcggaacagaaaccacacacaaacagcttctccgtcgggagcacagcttcctgggacaggctgaccgctttaaagagcatgataatcctgtcaacgtttagcagaaccgaactgctaaacatcaacacgtttcaacctggtctccagaccacccagagaaaggtctgtgtccaaaagccgggggatgcggtggggaggccggggcccagcaagcctgagctccgcttgccacttggctccagctccacccaaagttccccggctgaaatgaagacgccaggacaaaagacagcgcaagcctctgcctgctcccaggggcagccttgggctgcagacgggagagaagatgcttagaaggcatgagcgggggacgggaagcagaggggctgaggggctacagaatgaatctgaggtcactgtgtccgccggccacaagaaagggcaggtggaaagagcagggtggcaaagtcagccaggctgggaacatcccttcacctctttgagaagctacttccgctgcacactgggagaaaccagtgcttgcctcataggcttgctatgatgaagccagatgtgaaatccagatggctgctcccagcacccagtttccaagctcaggcgtccacatgtatcatttacaatttgcgccctcctcactccgatgcttatttacttattttgctttgaatagactccttcaaaaaattattttgaaaggaaactttatattgctattgtaagtggagaaccagcaccactcgccataaatagaggctaagtgtcaaaatgaaaagaacaaagaacaagccattattacaagtgatctgtctcgcgttgcctgcggaaagcggaggtcggctttctctatggaagggagattagcaagttttccagtggtttaaagatggcgccacagcgagactttctcctgatctaaccagagacttgaaatggagagtggaaaaagctggaaaaagcacgctgtagctcaattaggggcgccagtctcaggaacggccctgccaccctaatccctcaggtcctgtgccaacggaggcagcagtgagaaaagggagctagaatcctgtggccctggcttatccctgcatgccggccaaggccccgcagcctctagaaggctcttggccaaacagcaatccctgctggcttagtcccagctcttctgccatccgggggcatccggatgacacctcctcacaagtcccatcagcgagaacctgcctcagccacagcctcagcctcagcctcagccacagcctcagtcggggcgtctccagcagggaacctcattaagctccccactgaccaggacgtgggccacaggatccctgggaccccccgtgcccacagctggcatcttgctccccaaactcaaccctgttttctctctcctttctacctccagaaaaagtcaggatggattatgtagacagacttgcctctgaatgtccatactgacgtccagaaaatttcaggggaggggaaaaaagaaaacccaacacttcctttcctttccagctcccagagctccgagttggtgttggatttggatacggggctcctggaagcggatatggagcagaaagtagggctgggtgggtggaggagggaggcaggacccccgtctgctctctgagtcagcccgggctatagagtggggccaggtccccctgcacggttgggattatgcgtatgccaagcctaaccgtcctgtccttacaaaggaggcctggagctccctccagcacaaatcgcaaattgggaagaaagagcttgaccagaagtgtttaatgcagcatttcctcaggaccactgtttccccaggatgcctatttccccaggacacctcagagtcccagggactcatgcagatttccaggccccacctctgacccactggatctgacccaggggatgagacctaaagtgtaaattttttctttttttttttgagacagagtctcactttatcacccaggctggagtgcaatggcgcaatctcagctcactgcaagctccaccccctgggttcaagcgattctcctgcttcagcctcctgagtagttgggaccacaggcgcccaccaccatgcccggctaaaaacataaatgttaagaaaattcccagccgggcacggtggctcacgcctggaatcccggtactttgggaggcgtggatcacctgaggtcaggagtttgagaccagcctggccagcacggtgaaacctcgtctctaccaaaaatacaaaaattagccgggtgtggtggtgcacgcacgcctgtagtcccagctactcgggaggtggaggcaggagaatcgcttgaacctgggaggcgcatgttacagtgagccgagatcacgccactgccttctaacctggctgacagagtgagactctgcctaaaagaaaaaagaaagctctcaggtaactcaggcccactgaagtctctttcccacagggtgtccctctgtccttactgtgtgtccctcgccccagctaattcttcctcaccctgcagatatgaggtcaaacatcagctcttcgggggagccttctctgcccaggacctccctcccaagtttagaccaggtgctgtatacatgtccaagccctagtactcttcctttacagtacttctcactatttctgttatacacatatatatatatatatatatatttttttttttttttccaagacggagtctcactctgtcgcccaggctggagtgcagtggtgcgatctcggctcactgcaacctctgcctccccgggttcaagtgattctcctgccccagcctcccaagtagctgggattacaggcacccgccaccacacggctaagttttgcatttttattagacacggggtttctccatgttagccaggatggtcttgatctcctgacctcctgatccacccacctcggcctcccaaagtgctgggataacaggcgtgagccactgcgcccggccaatttccattctgtagttgtgtgacttgttgaatcatgtgtgtccccccactggactacaaagctccacgaggccagggagatacttagctcactctgcttctggcatcaggcatggcacaaagtaggcttgcagtaaaaatatctgtggattaaacgaatgaatctggaatagctgcttctaattcccgcttcccaccgtactcgctcttctcactaaggttttctggacacctgaaagcaggtacttcgaaggaaagatcctgccgctagaatatttttcagttagacagatatagaacgatcccacctgctcacctgagtggagatttaagagtttaaaatttcagccgggagcggtggctcacgcctgtcatcccagcactttgggaggctgaggcgggcggatcacaaggtcaggagactgagaccatcctggctaacacggtgaaaccctgtctctactaaaaaaaaaaaatacaaaaaattagccaggcgtggtggcgggcacctgtagtcccagctacttgggaggctgaggcaggagaatggcatgaacccgagaggaggagcttgcagtgagctgagattgcaccactgcactccagcctgggcgacagagcgagactctgtctcaaaaaaaaaaaaaaaaaattgcagccgggcacggtggctcacgcctgtaatcccagcactttgggaggccgaggaagatggatcacctgaggtaaggaatttgagaccagcctagccaacatggtgaaaccccgtctctactaaaaatacaaaaattagctggatgtggccgcaggcacctgtagttccagctactcgggagactgaggcaggagaattgcttgaacccaggaggcggaggttgcagtgagccaagatcacactactgcactccagcctgggcaacagagtgagactccgtctcaaaaaaaaaaaagactttaaaattttttatatagaagctgagtgcagaggctcacacctataactacaagcactttgggaggccaaggcgggagggtcaattgagcacaagagtttgagaccagcctgggcaacatagcaagaccccatctctacaaaaagtaaaacattagctgggtgtggtggagcaaaccggtagtcccagataactgggaggctgagaagggaggatcacttgagcctaggagtttttgaggctgcagtgagctctgatcacgccactgcattccagcttgagctacagagcgagacgttatctcaaataaatacataaataattctcatatactaacaaagaataagaagagaggcagcctttgaatcccccgggtctgatagcgcccaaggggctccaggacagctttgctcagggttacaagcagagggaagtaaatgttttccacccaatccaagatatcttctttgcggctagtaaaaacttgactgctccccaggatcaaaatgtgggtaaaatttcccccagatttatctcttaagttctattcacgaacaggtttgttgaaaagttttgtttgaattagcagaactctctctctctgaaaatacaccccagaaggaagcagtcctcccattctccagcaagtacaggcaaggtcccatctgatccaccagttctggcagccagatacccacaaatgtttagctctgccatgggatatgtagaataaattaagtttaggggaaaaaatcataaaacaagcctctgagtctaaagactctgtgtaccttggcaggaggaatgtgtgtgttacaacaaactctatccagtgtgccagggaactcaatcaaaaccagcagaaaatgattcctgtcatgggacaggcaactccacagccggcccctgggggagatgaagataagagggtccaatctaggccgggtgccgtggctcgcacctgtaatcccagcactttgggaggcctagacgggcagatcacgaggtcaggagatcaagaccatcctggccaacatggtgaaaccctgtctctactaaaaatataaaaattagctgggcgtggtggcacacgcctataatcccagctactctggaggctgaggcaggagaatcgcttgaacccgggaggtggaggttgcagtgagccaaggtcgcgccactgcactccagcctggcaacaaagtgagactccgtctcaaaaaaaaaaaagagggtctgatctctccttgcatttgccaaaaatattttgcatcatggccgaggacagaaaaagcctaaaaccctgagtaagaggagacggacattctaaagtcaaagcctctgcaaacacaaaacaaactccacaggaaaacttgctcatggaggtctttccctctgggactctggctggatgtcttccgctaggagatgagtcttaagtcactgcagggcatgctttacaacgggagtctgtggataaagtagggctccactggtcttgctaagtacttgtctttttttttttttttttttttgagactgagtcttgctctgtcgcccaggctggagtgcagtggtgcaatctcggctcaccgcaacctccgcctcccgggttcaagtgagtctcctgcctcagcctcccgagtagctgggattacaggcacccaccaccatgctcagctaatttcctatttttagtagagacggggtttctccatgttggtcaggctggtcttgaactcctggccacaggtgatcctcctcccaaagtgccgggattacaggagtgagccgccggccacgcccagcctactgttcacatttctaccagtatcctgttcacactgcctaggttttctccaagacagctgaggctttctctacagctctcctcttttctttctgagccctccccggaactgcctttcacattctgttcagggcaacgtaggccttttccatcatgaacctcaaaactcttccgacttctacacgtcacccagttccagagctactcccaccacttcaggtatcagttacagcagcacccccacttctcggtaccaatttatttctgtctgaatccattcaagctgctacaataggacagtgcagactgtgtggcttaggaacacaaaagtttctttctctcagttgtggtgggtggaagtcgaaagtcagggcaccagtggactcagtgtctggtgagggcatgatcctcacagatggcgccttcttgctgtatcctcacatggtggacgtggtctgtcttggaccttttcttttttctttcttttttttttatgagacggagtctcgctctgtcgcccaggctggagggcaatggtgtgatctcagctcactggaacctccgcctcctgggctcaagggattctcctgcctcagcctaccgagtagctgggactacaggcacgcaccaccacacccagatcatttttgtatttttagtagagacggggttttgccatgttggccaggctggtctcgaactcctgccctcagatgatctgcctgccttggctcccaaagtgctgggattacaggtgtgagacaccacacccagcctaaacaccaactattctaaagctgaagttaaggatttgtttaagacatacctaaaactaccgtgaaaccttcagttttcaagaatattctaaaaagctgagcataaaagctgtagctctctttctcaatggtcaccaccatcccagatatcaccagggccatcaaaatagggcagggggcaagcatcctctaagtggaattcttcaccgatacctggtagagacctcctctaggtggcacgagtatccctcactaaataacactgaatagaagagtgagaaggttattccttttgtagttttctttcggtccttccaattactttaagagaagagtcttgctttgatgtcaataaattactaacgtttctctaacacctgctcatcttcctttttaaccaaagatataaatcttttttttttttttttgagatggggtctcgctctgtcgccccaggctggagtgcagtggcgcaatcttggctcactgcagcctcgacctcccaggctcaagtgatcctcccaccccagcctcccgagtaatggggtcacaggtatgcaccaccacacctggctaacttttgtatttttgtgtagagacgacgtttcaccatgttgcggctaatttttgtattttttctatagagatgaggttttgccatgttggccaggctggtcttgaactcctgagttccagggatccacccgccttggcctcccaaagtgctgggattacaggcatgagccaccacgtccagcctaaatctaaatttttaaaatgagtatatttaaagaaaaatgtaagtaaatggtaatatagctggtattgacatgaaagaaccacaaaggtgatactggacggctgagctatagaaaacagccctacaggctgggcgcggtggctcacgcctgtaatctcagcactttgggaggctgaggctggtagatcacgaggtcaggagatcgagaccatcctggctaacacggtgaaaccccatctctactaaaaatacaaaaaaattagcctggcatggtggcgggcgcctgtagtcccagctgctggggaggctgagacagcagcctgtgtgtgaacctgggaggcggaggttgcagtgagacaagatcgcgccactgcactccagcctgggtgacagagcgagactccgtctcaaaaaaaaaaaagaaagaaagaaagaaaaaaagaaaacagccctacggcttacacacgaagggtctgagatgctggttctcaggatcagctatgaccagaggaaacttgttagaacagattggagttcctgctcttccctcactctgttaatttgctcgattgccctcaggcttctctttctatcccatagccagccaagagcaggcaggggccaattttctgggtttcttgaccctactttgaaggctctctggcatgatacaaatggatcccatccaccaaggaggaactgacaacatgatttactattggaaggatctggttcgaaggccatggcacctccactgtctgggagagtatctttaccaaaaaaacttgccactcaagaaacggagcaagctattccaggaaatactttcagatgcagtttcccgtccagctctagtttgaaaatgaggccttctcagtctgagcccacaaccatatttcatgggccccctccctgagatgtgtttatccacgctgaccgatagttcaaagcggtcgtttggaagtggaataaagagtcgctctctaaattcaccaaaggagttaagaccaggaatactggagcgattccgactgaggtcacggggagtttaggggaaatttttggtttgggttttctcctagttttaattgcttataaaagctccttaatgtcaagtaaagaacaacaacaaatgtgaaaagttgacttccccaagacgtttattcaaaagaaaaaaaaatggttcccagcaacccttatgcaggagggaggggattaggaccagataatcttgtatgaaaaggaaagggaaacgcaaactactcaaatacaaaacaacagctgcacggacgggcctgccagagaaacaactgatctgctctgtcacgacctgtttcacggatcccagatctgctctggggacaccacagtcagctccactcccatcaaacgcgattcaatggaccatccaaaccaaactcaggctgcttccttctctctgaaaggcctggccctcaggccgttccagacaccccttccctgtcctccacggggtactctgacttttcataggtgactaaacaacaggcaaaaccgagcaaattaacagagggaagagcaggaactccaatctgttctaatgtgtctcctctggtcatagccgatcctgagaaccagcatctcagacccttcctttgtaagcatcaagcaaagggcccagggcagagaggtgtgggttacttctgcagtaaggaagttggaaagggtgagtcagaagctaaggaaaacgctcactcccggcagtgaaagtgagccttctctttgtatattatgttatatacttttaactttaaaaaatttattattattattattattatttaagacatagtcttgctctgttgcctaggttggagggcagtgacctgatctcagctcactgcaacctccgcctcctgggttcaagtgattctcctgcctcagcctcctgagtagctgggatgacaggcgtgtgccgccgcgcccggctaatttttgtattttccatagagacagggtttcgccatcctggccaggctggtcttgaactcctgacctcaggtgatccacccaccttggcctcccaaagtgctgggatgacaggcgtgagccaccgcgcccggctaatttttgtattttccatagagacagggtttcgccatcctggccaggctggtcttgaactcctgacctcaggtgatccacccaccttggcctcccaaagtgctgggatgacaggcgtgagccaccgcgcccggctaatttttgtattttccatagagacagggtttcgccatcctggccaggctggtcttgaactcctgacctcaggtgatccacccaccttggcctcccaaagtgctgggatgacaggcgtgagccgccgcgcccggcctgcatagttttgacttttgaacctcgtaaacattttacttttactaaaagaataaaatcaagtcaaaagtaggagcaaacagcaaatcctaaagtttaatatgagcagaaacatgtgaccctaactctaatagtaactattacctatctagacaaaaaggcaaataatttaagtgacttttggatctagctctctgactattcctcctttcttggatgtgatctaaggacaaaaagaactgaaaagaaagtttgaacttgacttgttaggatcactgctggccatgattacggatgttgcaaatctgtaaacaaggttatcacagtgggatgagaggaacacagatacggactggggaagtaaggaagggccctgggcagctggttctgagtgcaacatatcagtatcaactcaagattttaaaacacatttaaatttctcagctctttcttttttttgagacacagtttcactctgtcgcctgcgctggaatgcagtggcaccatctcggctcactgcaacctccgcctcctgggttcaagtgatttgtgtggctcggcctcctgagtagctggggttacaaacaagtgccactatgctcggctaatttttctgtttttagtagagacggggtttcaccatgttggccaggctggtcttgaactcctgaactcaggtgatccgcccacctcggcctcccacagtgctgggattacaggcgtgagccgccgcgcctgaccattctttgctctttctattgaaagtggctagaggcagtgagaggcccagcaaggaacacacttcatgaccagatgttggtttctaaggaccatccctccaccaaagggaaggaggatttctcagaggaagagctgattccaagactaggggagggagaggccaagctgagcctgaacgtctcactgagtgccagaaaagcaagcaaatgcttacacgatgctgggaacatgttaaaagactcaagagccatcttgaaaagactcctacttaccaaatttgggatacggtaaaaaatagtgaatttaataagctacagcaatagatttttttttttttaatccatgagtctgaaatgatactaaaaaatggagtggaagaacatgaggggctctttttttgttttttcttttaaattgagacagtcttgctctgtcgcccaggctggagtgcagtggcatgatctcagctcactgcaacctctgtctcctgggctcaagcaatcctctcacctcagcctcccaagtagctgggattacaggcatgaaccaccatacttggctaatgttttgtatttttgatggagacggggtttcaccacgtttcccaggctggtctcgaactcctgagctcaagcgatctaccagcctcagtctcccaaagtgctgggattacaggcgtgagccaccgtgttcagccaatgaggggctcttcataaaggaatgtgaggtaataaatgtagaaggagtgacaatttaaagcccaggattctgcaataatcaatgtagaaacagattcaggaggccaggcacggtggctcacacctgtaatcccagagctttgggaggccagggtgggaggctcccttgagaccaggaattcgggatcagcttcggcaacatagtaagaccccatctcaaaaacataaacataaaaataaaacttaggtgggtgtggtggcccatgcctgtagtcccagctactcaggaggctgaggagggaggatcgcttgaatccaggagttagaggctacagcgagctatgattctgccactgcaacccagcctgggtgatggggcaagaccctgtctcttaaaacaaataaaacagattcatgaaagaatcatcacatatcagtggatgtgaagccactgggtaacaagttactgggaggagaacattcctacggtcctaaagtatcacaccacttactgctcgttagttacaaaggagaaactacctttacaaagtagagtgatctggcagacattagctcaaccaaatgtttaacctcagcatcatcaataacaggacggaactatgatgtggctcctggtgagatgcaacaggagctctgcggcattcctgccagaaatgtttggcctggatgtaatcacgagggaaccatttgacaaattcagactctggaaaattctgcaagacaacagacctatgctctaaacgtatcaatgctacatttcttgggtatgataacggtattattgctaggaagagaacacccttgtttttaggagataatgaaggtttaggaatgaaatatcatgataaatataatctattttcaaatgccccacagtatactcaggggattggttctgggacccccacatattccaaaatccgcatatactgaagtcccacaatcagcccagcagagcctgagtgtaggaaaaaccagcctctgcatacatgggtttcacatcctgcgaatactgttctgtcttctttgtttttttgagacagagtctcactctgtcacctgggctggagtgcagtggcgcgatctcagctcactgcaacctccacctgggttcaagtgattctcctacctcagcctcctgagtagctggaactacaggtgcccgccaccacgcccagctaattttttgtatttttagtagagacggggtttcaccgtgtgagccaggatggtctcgatctcctgacctcatgatcagcccgcctcagcctcccgaagtgctgggattacaggtgtgagccaccacgctcagccgtgttttgttttgagacagggtctcgctctgtcccccaggctggagagcagtggtacaatcacatctcactgccgcctcaacctccctggctcaagcgatcctcctgactcagcctcctgagtagctgggaccacaggagcatgcctccatgcccagataatttttaatattatttgtagagatgggggtctctctatgttgcccacgctggtcttgaactcctgggctgatgcaatcctcctgcctcaacctcccatagtggtgggattacaggtgtgagcctctgcacctggctgacactgtatttttgattcacatctggttgaaaaaagtccacatacaaatggacccttgcaattcaaatccacgtcattcaaggatcaactgtccttcagggaaaaaacatacccactgcttacacagagctctgtagaggtttatgtcaggctcatacagtgtgttccccagatcagcagcagcaatgcctgggaactgagtgaggaaacacgttaaccattgctcagtttcggtgaaaggacacagttaccgttgctgggttccggtgaagggacacgtctgccattgctcggttccggtgaaggggcacagttaccgttgctcggttccggtgaaggggcacgtttaccgttgctcacttccggtgaaggggcacgttcaccgttgctcggttccggtgaagggacgcgtctgccgttgctcggttccggtgaagggcacaggatgggcattcatggtacttgtcttcaacttttctgtaggtctgaaatttcccaagataaaaagttcggagtagggagagtaagtcttaatccatttccttctcagggaatcaaaaccacggttcttcagagtgttgattcttaaatttgccaaaacgtaggggagtgctagcttagatccatctgtgttccctagttccatgtcccatgggacaagacaccagcctcaacggtattaggtcaggagggcggattgcatggaaagaaacagaatcgaggaacaaagtgggctctgcccgttcaaacggctgccctgggagtacaggctgtttctccctgataaacatcggtgagaccaacatgagtgtgaggctttgcaggaacttgccctgcatttcctccctctccagataattctctggtctaacatttcagaaggctttttaccagactcaccctgagatcctttccaacctgattataagagaaaccatcatgaccccactgctcactctgaggctcctctaattaacggacctctaaggaatgtgtttggcattaaaggggcagaggtgggtaaagttaaggaagctgctgcaaatctcctgaaaacggaggcaacccaggcggtgttctgtcagtctgctgcccaaggaagggccagatgccctgaacccttctctctcattcaacacggatgaaaagataaagaatccagaaactaaagggcagattctagaatttacctcctgcttaagctgtcctggcagtcaggctcctggatctcggaactagaaccacgcctggtttatgtaaaatcaggagatgggactaaacagatcatctcgtccacactgattgaacagaggagaaaagcacaactcccagaagtcatctttctcgctcgatattgtccatctcccctccctgtgctccttcagtggaagcgcattgggtgatatcctctgtattaggtagcaatgttttctgggcaagggaaactattggtattacaggctggctgacaaaagctggagttacacttttttttttgagacagagtctccctctgtcacccaggctggagtgcaatggcacgatcttggctcaccgcaacctctgcctcctggattcaagtgattctcctgcctcagcctcctgcatagctgggattacaggcatgcaccaccacgcccggctgattttgtatttttaggagagacggagtttctccatgttggtcaggctggtctcgaactcatgacctcaggtgatccgcccacctcggcctcccacagtgctggtattacaggcatgagccaccacgcccggccgagttacacattttctataaagcaatgacagtctctcccctccaagaaggaccttggcaatgtctacagaagtcaataatgtccattattctttggcttagcaattccaattcacagatatgcatgtgtgaagtgtgcagagatagatgtgcaacaatgttgctgggcgcagtggctcacgcctgtaatcccagcactttgggaggccgaggtgggcagatcacttgaggtcaggagttcgagaccagcctgaccaacatggagaaaccccatctctactaaaaatacaaaattagccgagcgtggtagcacatgcctgtaatcccagctactcaggaggctgaggcaggagaatcgcttgaacccgggaggtggaggttgcagtgagctaagatcgcggcattgcactccagcctgggcgacagagcaagactctatctcaaaaaaaaagaaaaaaaagtgtgtgcgacaatgtttatcatagtattatttgctacagcaaaaggagaaggaaggagtgaaatatccatttatcaggcagtgggcaagtaaattacgctctatatattcaatagaatacaatgctgttattgcaacaattaaagcaggtcggctatgccgataggaagagactggcaagatattagatttttttttttaaatcagacgtttcttttgtaaatagaacagacaatacccgtcacatacatgtataaatgcacagaagatatttcagaaggatgtatataagaaacttaaggctgggcgcagtggctcacacctgtaataccagcactttgagaggccgaggcaggaggatcacctgcactgaagagttcaagatcagcctgggcaacatggtgaaacgctgtctctacaaaaaatacaaaagttggtggcgggcgcctgtagtctcaggtactcgggaggctgaggcaggagaacccttgtacccaggaggcggagcatgcagtgagctgagatcgcgtcattgccctccagcctgggcgacagagaccccatctcaataaatagataaatgaaccttaagagagaggataggtgaggagttgtacctcagtaacacccttcagtaccatgtacctgttttaagtacgtgcatggagttctgcttttataaagaaagaaaaagtcctggcagcctctaacgttgttcaatttcagcccagaccctatcaagcaaggactttttaactgaatcagcaattaaactgctagatgtggactaatctggtttgtgatctgaaaatacatattcttagtgaaacaaatgatttgagcatgggtcagggcaaggccaacattcaaatactgcaaaccctcagctggtgccagcctcaggctgcgggtcagaacatgtgagtggaaacagttcccaggaaagaaaactgatgccagcttggtcagcaagttctcggggttctccggggaattctccagcttggtcagcaagttctcggggttctccggggaatcctccagcttggtcagcaagttctcggggttctccggggaatcctccagcttggtcagcaagttctcggggttctccggggaatcctccagcttggtcagcaagttctcggggttctccggggaatcctccagcatggtcagcaagttctcggggttctccggggaatcctccagcttggtcagcaagttctcggggttctccggggaatcctccagcttggtcagcaagttctcggggttctccggggaatcctccagcatggtcagcaagttctcggggttctccggggaatcctccagcttggtcagcaagttctcggggttctccggggaattctccagcatggtcagcaagttctcggggttctccagggaattcttgccagtcccttaagattatgctcagagtagggcttgcccagctaccaacatatgctttcctgttgttgaaggagaagttcagcaaaactatgtagctaaatgacacgaaaagttttttctcaaagcctgggagaacagtagtttggcctctgaagaatcccaaacttgtggttaataagagaaaaatagacagtttaacacgtggaagattgaaaagtctaaacaggccagcgtggtggctcttccctgtaatcccagcactttgggaggccaaggcaggtggaacacctgaggtcaggagttcgagaccagcctggccaacatggcaagaccccatctctactaaaaatacaaaaattagccaggtgtggtggcgggaggctgtaatcgcagctactcgggaggctgaggcatgagaatcgcttgaacccaggaggtggaggctgcagtaagccgacagaatgagactccaactcaaaaaaaaaaaaaagtcttaaatgtaccttgcaaagagtgtgcagaagctgttcagatgtaagtgggggtcctgtgtggttgttctgccttgttactaatgaccttcagagtgacaggagcatgacctattccggggacacagcagggacatgtgttgtgctccagcagagcctgtacggcgtcccatgggtcatctcctagctggacactggcaagagttccagagtcatctccctcccttcattcttcaggctgcttccctgggaaccattccccagaactcacctctcctctgtccttcacacatgggattccctctatccgatccacccttccccggaattcccctctcctccagccttcacacgtgggattccctctatcccagccacccttcccagcaatgtttacctgactccagctccttgatgagaatcactgggaaactccctgaccgtatctccctcgaactctcatccagccagcagggtgagggagctcctcctcggctctcacccgcagacttaacgccttcgcgctccccaagcacagaaactaccttgtctttttttgttttttttttggttttttgtttgtttgtttgtttgtttttgagacggagtctcgctctgtcgcccaggctggagtgcagtgatgcgatctctgcttactgcaacctccgcctcccgggttcacgccattctcctccctcagcctcccgagtagctgggacaacaggcgcccaccaccacgcccggatcatttttttgtatttttagtagagacggggtttcaccacgttagccaggatggtctcgatttcctgacctcgtgatccgcccgcctcggcctcccaaagtgctgggatgacaggcgtgagccaccgcacccggtcgaaactaccttctctacatcgtgatcaccccagtgccagcaccgaccctgggccgggcccaccatcccgcctgtgtttgtaggataagtaaatgagcagagaaaggaaaatgtccagatgcacaaaaaggaaacctcggaaatccctgcagccagagaaagacacagaaaacacggaggctgagtgttggagcttcccagggccccgggtggaaggtctcccaggctttctatcactgcagacgccaggtggtggctggggcagattctacccaagcctcctgccttatattaagtcccaccctccacacagatgaacctctagacttgggtgaaccccactgaccagacagttccttctctctcatctcacatcctgcctcctgtttgttaacttcccagcacagatctgtttctctgtaaagggcaggcagcccttacacaccctgggttacatcaaaggccagaacgaaaggccagcacggcttaagagggccgtccagaactggctgctgacaccaacccaagagtgatccagcttctgactcaccaggcaccagctcatgctctctgatccaggagccccgacaagcgacctgaggttccaggggggctgcctgacacatctctgctccgaccaacagggttaggaacctacacagattacgaggtggaagaaggaaggtctctaaagctcctgagctgcaaacaggaccatattggcaaaagctcctgtgtccctgttcacatccacatactttaagtattatttctgcagcatttaaatactttagaaagatactgtaagaatcgctgacatatgtaggtttcaatgaaatcactcagggagccctccccactcgggaaagactccttattacagagcccagttctgtaagttccctggagaaatgagtgaggagggaaggcggacgtggtcagtcataaaatcttgacgctctttttcacttcctctgctcgttcgtgttccacggacagttaacagctacgtcctgccaattctcctccaagcctctctgggaaccagttctttgcctctgatctcggttaagaaccgctgacctgctgcccagagtaaaaggtggcgtgcgagagctctcgtacttaggaaggaaaggatggtgccaggcgcttggtgcttgccttaagccggcagttttcaaccggggggtggttgtgcttcccacgggccatttagcaatgcctgggaacgttcctggctgtcacattgcggggtggagtgttactgacacagtaggtagaagccaggatgctgtccacgttctaccaggcgcaggacagctcctcccacagcaaagaagtacctggctcagaacgtcagcagggccaagaaaccccacaccaagcctctcctgggattattccagtctccatttggcccccagtcactttctgattccagttctccagcccaggaatgcaggacgtggattagagaagcaaagggaaagttcatccagaaagattccggttctgtgagtgttactaacggggcaagcaccttgaaggtaccgtgggacgtgggtgattcatgagcctgaattgtctcactgttatcacgtgatcagagtgaggcggcctaagggagcatcacaggatgggaagggccaggttgaatgaaaaatcctggctgagttcagtggctcaggcctgtaatcctagcaccttgggaggccaaggagggaggattgtttgagtccaggagttcgagaccagcctggacaatatactgacaccctgtctctacaaaaaaaaaagtaataatacaaataattagccaggtgtggtgtcccgtgcctgtagtcccagccacttgagaggctgaggtgggaggactggttaagcctggaaggcggaggtgccagtgagccccgattgtgctactgtattcaagcctgggcaacagagtgagactctgtctggaaaaaaaaaaaaaaagaatcttatccaccccacccagtctttctttctgagcaaatggtttggaatctctcacacttctggtgctacatgcttttatttatttatttatttatttatttttgagacagagtctcactctgtcgcccaggctggagtgcagtggtgcgatctcagttcactacaagctccgcctcccgggttcacaccattctcctgcctcagcctcccgagtagctcggactacaggcgcccgccatcacgcccagctaaattttttttgtatttttagtagagacggggtttcactgtgttggccaggatggtctcgatctcctgacctcgtgatccgcccacctcggcctcccaaagtgctgggattacaggcgtgagccaccgtgcccggctatgcttttattttaagcacggtgatcttcgcagctctcattctggagccacattggcagccaccatgaactaagggagtgtacatacaacctcccaggcaccccgaagctccagggttagaacctggtcactgtggtgacctcaatgatgaggccaacaagtaattgattcctaatatcacttagtgaagttagtaaatggtctgttttccagtgataaatcgcagcatacgcattcactttttttttttttttttttttttgagatggattctcatcgtgtcccccaggctggagtgcagcagcacgatctcagctcacagcaacctccacctcccgggttcaaatgattctcctgcctcagcctcccgagtagctgggattacaggtacgtgccaccatgcccagctaatttttgtagttttagtagagacggggtttcaccatgttggccaggctggtctcgaactcctgacctcaggtgatccacctgcctcagcctcccaaagtgctgggtacaggcatgagccaccgcgcccagctgcatttgcttttgataagtttccctgaatggaaaatgttgatgttacactagctaattgggaatggcatgtgttatccagccctgatccagctctgctgtgttactgatgaacacctaacagttacccgcaagcttgcaaaatgcttttatgaaccacatatcaccaagcatctgcagtgctatttgctttatttcctgggaaactcgggggtgagggattgggggaggaattatcaaaatttggacaaacccagagaagtatgttatgtgtggaatttcagacaccatgtgtgctgtggcaaaaataaaaataaaaaatgaaaaagttgaggactgtgattctaaaacaggatgaggaagaagggcctgaagccataaatggaagaaccagggatgatggagagttcctgcactgagtcctggcctttctgccaagctgccgaatgctcagaggccacgatgctgaacccgtgaatcaaagacaagaggagagggagggagggagagagggggagagagggagagagagagagacggagggagggagggaggaacacatcaaagacaaggagagagacagaggaacacgtcaatcaaagactaggagagagagagagagagaaacatcaaagacaaggagagagacagaggaacatgtcaatcaaagacaaggagggagagagagagagaaacacatcaacgacaaggagacagaggaacacgtcaatcaaagacaaggagagaaagagagaaacacatcaatcaaaggcaaggagagagagtgtgtttgaggaaacaccagcctatggtgtttaatcttcagtgccaacatgagtgagctagagggtaccctgatatttgattaaacatgatcctgagtgtgtctgtgactatgtttccgggtgagatcttttttttttttttttttttttttgagacggagtttccctcttgttgcccagactggagtgtgatggtgcaatctcagctcactgcaacctctgcctcctggcctcaagcgagtctcctgcctcaacctcccaagtagctgggattacaggcgcctgccaccacgtccagctaatttttgtatttttagtagagacgggtttttgccatgttggccaggctggtcttgaactcctgacctcaggtgatccacccgccttggcctcccagtgttgggatgacaggtgtgagccaccacacccagctgagatcaacatttgaatcagcagactcggaatataaagcagactgctctccccagtgtgggtgggcctcatccaacccactgaagtctaaggagaaaaaactaaatagaaaaaactgctgacagggagaattctctctgactgtcttccagctgggacacccgtcttcctctgccttcagacttggcgggaacttacaccatcagttctcctgggtctccagcttgccaactgcagctcttggggcttcttagcttctataaccatgtgtgccaatcctttataagaaatctctttcagccaggtgggtggctcacgcctgtaatcccagcactgtgggaggccgaggagggtggatcacttgagatcaggagttcgagaccagcctggccaacacgatgaaaccccatctctactataaatacaaaaattagccaggtgtggtggggggtgcctgtaatcccagctacctgggaggctgagacaggagaattgcttgaacccaggagacggaggttgcagtgagctgagatcgcaccactgtactccaacctgggagacagagacactgtctccaaaaaaaaaaaaaaaaaggagtctccgtctccttctgtacttctgtacttatattttgctagtcacagagagacctttgagaatatacaacgtgaatatcaacttcttactggaagcttcttttagcatcttcttgagacctccttagctagaaagtctggcaaagtgaagttctggaagctttgtgcatataaataatgataatatcaatgggttggtaggaaacggccttctcagacctatgaaaaaaatatatcctcctacagtttattaaggaaaaatgtttatgccttaatttaaaccatttccctggggggaaagaggagcagttcattaattacataggacagtgagtgagggagtgggggaaacacacgggttctggtgaggatgatcacgtctcagcttcctccatttctccaacatcagctgctcaagacagaatcatggtctttttccagcatctgagccgcccactcctgacatggtttggctgtgtacccacccaaatctcatcttgaattctagtccccataatcccacatgtagtgggagggacctggtggatggtcattgaatcatgggagcagtaaccctcctgctgttctcatgatagtgagtgagttctcacaaggcctgacggttttataagggactcgtcccccttctgctcatccttctccttcctgccaccatgtgaagaaggatgtgtttgcttccctttcccccatgattgtaagtttcccgaggcctccccagccctgtgaaactgtgagtcagttaaacctctttcctttataaattacccagtctcagccgggcacggtggctcacgcctgtaatcccagcactttgggaggccgaggtggatcatgaggtcaggagtttgagaccagcctggccaaaatggtgaaaccccacctctgctaaaaataaaaaaattagccgggcgtggtggcaggcacctgtcatcccagctactcgggaggctgacacaggagaatcgcttgaacccgagaggcagaggctgcggtgagccgagatcatgccactgcactgtagcctgggtgacagagcgagactctgtctcaaataataaataaacaattacccagtcttgttatgtccttacagcaatgggagaacagactaatgcagctcccaggcacaagcctggatcacaatcatgccactgcactgtagcctgggtgacagagcgagactctgtctcaaataataaataaacaattacccagtcttgttatgtccttacagcaatgggagaacagactaatgcagctcccaggcacaagcctggatcacaaaggcagccagtcactactgcacactcctccatgagaaaaccagaatctgttacaggtgaataaataaattactggcgcaaaagacaaaaatgactacagaaaagaacaatttcaaagaaacatatcaacagtgcaattatagaacaccatttaccattggtgaagcactttgtgtcaagcaccataaaacactgctttatatatactaccttttttcttttttttttttctgagacagagtcttactctgtcacccaggctggagcgcagtggcacaatctcagctcactgcaacctccgcctcccgggttcaagtgattcttgtgcctcggcctctggggtagctgggattacaggcgcacgccaccatgcctggctaacttttgtgtgtttaacagagacagggtttcaccatgttggccaggctggtcttgaactcctgacctcaggtgatcctcccatctcaggctcccaacctactgggattacaggcgtcagccaccatgccgggtgctatactacctcttttaatcctcacaacagaatcttctatactattatcaacaaccccattgagcagatcagcaaacagactcatagagataagccactcactgaaggctgcctggttaaatcactgaatcataaatcagagagaattcaaacctgggtctcttatctcaaaagtcttaatttgcctcactacacacttaagagcagaagatcgaatcagactagtgtgaaatgaaatagggtttttttgttgttttggttgtggtgtttttgtttttgttttaagattctgctctgttgcccaggctggagtacggtggtgcaatcatagctcactgcagcctccaactccctgggctcaagtgatcctaccacctcagcctcccaagtagctgggattacaggcacatgtgaccatgcctggtaaattaaaaaaaaaaaaaaaattgtagaacccggtctcattttgttgctcagggggtctcaagctcctggcttcaagctatcctcctgccccggcctcccaaagtgctgggagtacaggtgttggctactttcaaaagctttttaggccgggcacagtggctcatgcctgtgatcccagcactttgggaagccaaggtgggcgggtcatgaggtcaggagatcaagaccatcctggctatcagggtgaaaccccgtctctactaaaaatataaaattagccgggcgtggtggcgtgcacctgtaatcccaggtacctgggaggctgaggctggagaatcgcttgaacctgggggggtggaggttgcagcgtgccaagaccgtgccactgcactccagcctgggcgacacagtaagaatccatcagaaaagaaagaaaaaaaagaaaagaaagaaaagaaaagagaaagaaagaaagaaaggagaagagaagagaagaaaagaaaagaaaagaaaggaaatgcaggtgcccagaaaaaaaggcaggctcccaaagtgaatactaagacactcaatctcacatgttgtcaaaaaagctattgaaatttcaggtgacagagggacttaagaacaacggtgctcaaggaagtcaacacaggctacgacgtacaggactcccaatccggctcatgaccacatcccctattgtggtcatttagaacacgctaggcgtcctttgctctaagcgtgtttcatgtacgtctccccatcaatgaagaaagcacctggagagtaggaagtaagagttatgtactctgagattctctcttaagcccaggaatcagtctcactgggcggggagctcaacagcgctgttagtgtcgttcgctgataattactttcacactagaataccatcttcattcctcatttatacgggaaactccttgtggttccctttggggcaccagctcccagcacattctatgtcatcaaaattaactcttggccgggcgcgggggctcacgcctggaatcccagcactttgggaggctgcgggggcggggggatcacctgaggtcgggagttcgagaccagcctggccaacacagtgaaaccccgtctctactaaaaacacaaaaaattagccgggtatggtggcggtcgcctgtaatccgagctactcaggaagctgaggcaggagaatggtgtgaactcgggaggctgaggcaggagaatcacttaaacccagtaggcagaggttgcagtgagctgagattgcaccactgcactccagcctgggtgacagagtgaaactctgtctcgaaaacaaacaaaaaaactaattcttaatatattaaacaaacgtactaaacaactatgggaacagcgacggtgttgtttttttttggagacggagtctcactctgtcgcccaggctggagtgcagtggcatgatctcggctcactgcaagctccgcctcccaggttgatgccattctcctgcctcagcctcctggtagctgagactactggcgcccgccaccaagcccggctaattttttgtatttttagtacaggcggggtttcaccatgttggccaggatggtctcgatctcctgacctcgtgatccacctgcctcagcctcccaaagtgctggaattacaggcgtgagccaccgcgcccggccgcgactgtgtttttcaaacagctgcatttaccagccactactggattccttctacgtgtgaagccctgtgctaaaggctgggaacagaaagataattgatacacgagcctttctttcctttatggaaggcccagccccatacggaagacggacgcgtacataaactattaggatacaggaaaagcgcgatactactggcacatagaggaaatcggggaagatgcttagaacaatgtctggggcacacgctcagtgctttacaaaatactcgttatttttaccatctaaccttgtgagttagagcgactgaagaggaaaggccgtagcgtctgagctgctctgtgaagaatgaaccggttttcaccaggcaggccaggagtgggatagggcgaggcatccaagaaacagcaagaggcaggcagagctcagcacacgtttttccagactgtgaaccatgaagctctgaaggctgctaggagggccacgggagctgtgggagagggtgaggctggagccctgtgggctaacagacagggctctaattcgtgacatcgtggcaacaaactattagaaatgaggctagacctggaagccctgggggcacagtctggaggggagacagacgagagctaagtagaatgcaggcaatgacgccgtaacagagatctgcacagcgaccattgcacagcgtgggggcaggcttctgagaggaggtaacatgctgaaaagacaacgtgtacagctgacattagtacacaacctcatcggagagagaagaagcggagggaatcccaggagcaggggccatcatgctcaaaggttccaaggtacggcaatgggcgatgtgtctggggaccctgggggtcgaccagtgtggctgagcagagtgtgcaaaggtgaggatgctagaaggccaggtgcggtttcggggcggggcaggggttgcccttgaaggtggggtttgggggtgggggagggggtgcccttgaaggaggggtttgcgggcgggggtggggggaccttgaaggtggggtgtgggggcaggggagggggtgcccttgaaggtggggtttgggggcaggggagggggtgcccttgaagtccacgccagggagtttgggttggatccacccgtaatgagggctggcccatagggcagtgacgtgaacaactggtactgtagccaggttgttctgggagctgtgtagacagggtgagactggaagttggtggactcattaagggactagtgaaacaatagtgccccaacctgattgaacccagtgaatggggggaaatgagaatgtcaaggcctgtagcttgggtagatgcgtcagtgagaccctattcataaccagagcctaaaaaaacacgcagagccagttaaaagctctaatatgtgtttaaagaacaaattaatgaaagaatgcgtagacaggccaggtgcggtggctcacgcctgtaatcccagcactttgggaggctgaggtgggtggatcacctgaggtcaggagttcaagaccagcctgaccaacatggcgaaaccctctctctactaaaaatacaaaaactagccaggtgtggtggcaggcgcctctaatcccagctactcgggaggctgaggcaggagaatcacttgaacccgggaggcagaggttttagtgagccaagatcgcgccattgcactccagcctgggcaacaagagagaaactctgtctcaaaaaaaacaacaagtagacagagagggaaggagaaggagagaacaaagcggaagaaaaactagtgaagagcagggaaaggaatctgggttttttttgttttggtttggtttttggtttttggttttttgttttttttttttgagacagagtctcactctgtcacccagtctggagtgcagtggcacgatctcagctcactatagcctccgtctcccaggttcaagcgattctcccgcctcagcctcccaagtagctcagattacaggcgcccaccatgccaggctaatttttgaatttttagtagagacggggtctcaccaagttggccaggctggtcttgaactcctgacctcaaatgatccacccgcctcggcctcccaaagtgctgggactacaggcatgagccaccgcgcccggccacgagtctggttttaaacccgtggagctaaaggtttctggcaagcagggaaaggacacgactcattgactgagaagcaggaggcgtccaacacaaaggcctcttgggaacccgctggggtttggcgggcgtcacctttctgcatcttgggaggagagctggtgggaggagcttttctgcaggtgtctctttctagcctccggcagggggcggcaacagaagacggttcagaagaaagaatgtggccaagtatgtgtatttcaagccaaaggattctagaaacttctctcacaggtacggaatccaaccacagtgcccactgtggtgaagccactgcgctggtccgagaagaaagtgacaaacaaaatgacatggagcccaattcatcctgagagcagaacctcggagccatgtggttaagatggaaattccacttttagtccaagcaaatcttctgatgtatcaagtttgagggtgaggtttcattaaaggaatttaaaataaaaaagtgagatcacagcaaattttttaaaatgattgtttcagtgaagggaaaaaaggtctttatccttattcagggcgtaattcctgatcctggtccccggagacaacacccacccttgggcgaatcattcctggggacggaggaatgagggaggcgtctctttatttccgggggcggaggagtgagggaggcgtctctttatttccttgtatataaaatacaagaactaaataccttggattaacaaccagggctggggtttgtgataaggctgtgattaggaccacataaaaggagaaaacgtcttaataagaacttctttgtggcctgttagagcctttcttaggaaactaataagttacacttttcctggagagaaaatcttggaaatgacccatttccccaacaggacatcatttccggtcattcacatgtggtcaagttaaaaaagatcgtttgaacctagctcagccaggccagggagaaaattaaaaataagtgtttatttttctgattaaagccaaacaatgagactcaaaataggccacacaaaacccacagaatcttccaagttcgcctgagctaatgcatccaaggacgtccactcacaggggaagaagcagaggggctggccttctcctaagggggcagggctggagatctgtcaaattccttatccatatctaggagcagagcttccttttggccaaaagagtaagctgactgcgaaggacagatacttccaagcagacactaagtaatgcagttggtttgataacaggacagatgaaaatggaaggcctcctccgaaaatcccacagcctgggccagggctccaaggggctgactggttcctgtggttcaaatctctgcaaacgtctccttccctcctgccccatctacggcaggtagctgagccgtggcccaggctctgggagtgcacactctcaacaagcagatatgaacagacacgtccagaaagtagataggtggacagccagtaagaatatgcaaaggtgtcatcaaggaaatgcaaattaaaatgatttcacactgactagaatagcaaaagtaaaacacacccacagtatcaaacccgggtgaggacgtggagcaagtgcgagtctcacactccgctgccggggacataaatggtgcaaacactttgttgttgtttgagacaggatctcactgttacccaggctggagtgcagtggtgcgatctcagctcgccgcagcaccccagactcaagtgatcctccagcttcccgggtagctgggattagaaacgcgtaccaccacactcgaaaattttccattgagacggggtttcgccatgttgctcaggctagtctcaaactcccgggctcaagaaatctgcctgccttggcctcccaaagtgctgggattacaggcgtgagccgccatgcctggtcagtacaaccactttgaagaaccgtttggtccatcttatgaaggtaaatgttcatttacctgataatcgactcagaattctaccgctcaggattcctactcatcagtatttacccaagataatttttttaagtccataaaaatgtttataacagccttccccaccccaaactgacaacaactcacatacatccatcattggaagaatggatacactgtgacaagatgctcgtccaatgggacacttctcagcaataagaaggaacaaactgatgtatacaaaaacaaggataaacctcacaatcatgctgagcaaatgaagcccgacacaaaataacactgactgtacgattccatttccatgacggtctacaggcaaaactaaattacagtgacagaaaaccaaagcgacggatgggagggggagtcaccagagaggctcagcaggggactgtgcagggagatggaaatgttcttggtcttgtttggataattgttcatatcggtataacagctgttcaaacacactgagctgggtccttaagaaccatgaattttattgtgttaaattaaacctaaaaaaagaactcataccaacaagaaggagaaaaaaataatttgtcttcatctcatctagagccaggtaactgagaattccagcgtgggcacagggtgctgcctcctgagcacggccaccttcccacaagtgaccacctcccctccctccctccctgcctttccctgccatggttccctgtctccatgaatggaaccaactaccctccacccagtgtccccaaaccagaaacctggcagtccttccccatgcttctctcttcctcatttctgctcagtcacttcctagacagctcctgaatgaggcggagccctcccccgtctctgccccaactgcctcaattgcaggggtttcttttgtttgttttgttttgttttgttttgagatggagtctcgctctgtcacccaggctggagtgcagtggcgcaatctcggctcactgcaagctccgcctcccgggttcacgccattctcctgcctcagcctcccatgtaactgggacttcaggcgcccaccaccatgcccggctaattttttgtatttttagtagagacagggtttcaccgtgttagccaggatggtctcgatctcctgacctcgtgatctgcctgccttggcctcccaaagtgctgggattataggcgttagccaccgcacccggcctctttgttttgtttttgagacgttgtcttgctctgtcgcccaggctggagtgcagtggcgcgatcttggcttgctgcaacctctgtctcccgggttcaagcgattctcttgcctcagcttccctagtagctggaattacaggcgcccgccaccacgcccagctaattttagtagacacagggtttcaccatgttggccaggctggtctggaactcctgacctcaggtgatctgttcatcttggcctcctaaagcattgggattacaggcgtgagcccccgtctccactaaaagataaaaataaaacttggctgtgtgtagtggcgtgcacctcgagtcctagctacttggggaaggctacacctggccaacttcctatttttaaatggaaagaaaaaaacacacaccagggccttgtttcctatctctcctgcccattccttctctctccacaactcagacagcgacggtgtcaatcaggccagtaagggaaaggctgggggaagacgatgctgactgtctcttactgaatctgtttctgagacatggaaacaccctgttcacagaggcctctcttcctcccacccctgccccccgcccagaactcccagcagaagctgctcactggctgttgtcaaagtagtctttgttcttggagttgaaccagcacaggcctcaaatttccatccacagctccaaaccccgcctacatcacctccatgacctcaggctaaggaaagaaagaagctggccaaaaacatgccaggctaagaagccaaagctcctcccaagagagatgactctggaggggaccctctggtctcctctccatgaagccaggtcgatgctggaagggcagaaatgcccagaaagaaaagcactgaggaaggctcacagggcaaggacttcagtggtcacggtcccatcatatacagaagccacggggcaggacttcaggggtcatggtgccacattttgtacagaagtgggaggcagcaaagccgcaagatctaaagacagagttgcaggcccaggtgcggtgcttacgcctgtaatcccaatcagcgtgggaggcccaggcaggcggatgacctgaggtcaggagtttaaggccagcctgagcaacatatgcagcccccatctctactaaaagataacaataaaacattgctgggccgggcgcggtggctcacgcctgtcatcccagcactttgggaggccaagacgggcggatcacgaggtcaggagatcgagaccatcctggctaacatggtgaaaccctgtctctactaaaaaaaatacaaaaagttagccgggcgtggtggtgggcgcctgtggtcccagctacttgagaggctgaggcaggagaatggcatgaacctgggaggcggagcttgcagtgagctgagattgcaccactgcactccagcctgggggactgagcaagactctgactcaaaaaataaataaataaataaataaataataaaacgaagctgtgtgtagtggcgtgcacctagagtcctagctacttggggggctgaggtgggaggatcccttgaacccagaagtttgaggtgacagtgagctatgactgcaccactgcactccagcctgggtgacagggcgagaccctgtctctaaaaaataataatcatgtaaaaaaaacagagagattcggggaactgtggatgatgactgcagggcatggtcaaaaagaagcagagaaaactcgccaaagcgagtcagggaagtgtgtccggcactgtccaggggaaggacaacactctggacacaaagatttgatggccacaggaaaagggccgttgggctggggacaggctgggacggatcctcctcctccattctctccccatccacccgactttctagaacaccttctggaccctggtttgcttctccagccacctagcagggaagtggagtcttgaatccaaacgttcagatactagaaaagggatggacggtccctcgggaattaataagctaaacggagctgaagacggatcccaagtgtctcaacagctctggatgtcccgataaaacatgtttctagaatgtgaacagttttgaaacatctgtattccaatcaccaatccagaatcttgggagctaaagaaagtgtgggctttcccccaaaacaaacactcagcggaggacacaggagaatgaccaaggtgtaaatgaaagaagaatctggcctggggcatcctatggcgagcgccatcccctttaggggtaagagggacatctaagaccaagcggagctgagtcaggcctcctgggtgggatgatacagtatgaaagagaggtccaggaaagggtctcattcaggctgacatgtcccatcatgatcagtcaagtttaggacagagactaataagactcaacatatgcggccggtcgcagtggctcacgcctgtaatcccagcattttgggaggccgagacgggcggatcacgaggtcagaggttgagaccagcctggccaagagaccagtctggccaacatggtgacacctcgtctctactaaaaatacaaaaattagctgggcgtggtgcaggcgcccgtcatcccagctacttgggaggctgaggcaggagaatcacttgaacccgggaggtggaggttgcagtgagcggagatcgcaccactacactccagcctgggcaacaagagcgagactcaatctcaaaaaaaagaaaagaaaaggaaaaaaaaaagagttcaggatttcatagtccgtctcctatgtctagtctttcatttctcataatcgtttcttagccaggaatcatctctggaagtaaatggcttccttttctttgcgcacacatgcccctctctgaagagaggcgccatgcccacctgggggctgcggtactcgcttttttttttttttttttttttttttttgagacagagtcgctctgtcccccaggctggagtgcagtggcgcaatctcagctcactgcaagctctgcctcccgggttcacgccattctcctgtctcagcctcccgagtagctgggactacaggcgcccgccaccacgcccggctaattttttttttttgtatttttttagtagagacggggtttcaccgtgtcagccaggatggtctcgatctcctgacctcgtgatccgcccgcctcggcctcccaaagtgctgggattataggcgtgagccaccgcgcccagctgtggtactcacttttaatgctccttagaaaattctaaccaaaggctccaaacgcagctcaaaaccctggcatggaaccacacaaaaggcacaaagaggctggggccaggtggagcccatcagaaattgaaggctctgtgtcaggagccaccccattctgaccacgggtccgggtttctccacggaagcagctcccaggtccccagtgttaggcagagtggatttcagtcaggaaaactacgcaaggccatgttcttagaatctctccaacattattcttggctctgctgacattgctttggctttaaaaaatcaataaattaagcaagcagaaggttctctaacatccaagctggactaaagggttttgctcttaccgagccagagggaatatttattccaagagacgtaagatagattctgctggacacctgccacttgctcatgattcttccctgggaggctggcagcgcacggagaggcttcgctccacgggaaccaacaccgttggccggcgcggtggctcacgccaggaatcccagcactttggaaggccaatgtgggtggatcacctgaggtcaggagttcgagatcagcctggccaatgtggtgaaaccccatctctactaaaaatacaaaaaattagccgggcgtggtggcacacagctgtagtcccagctactcaggagactgaggcaggagaatcacttcaactcgggaggtggagcttgcagtgagctgagatcgtgccactgcactccaacctgggcgacagagtgagactctgtctcaaaaaaaaaaaaaaaatagaaataatacctcttactacactggatggtttgaattccaacctaaagcaaaaagaggaaggctttgatctcattctattgtttatcctaacatttttgcctgacagtctggataaaacaaacttttattttgttatttatttattttttttcagatccaggctggagtgcagtggagtgatcatggctacggccttaacctcctgggctcaagcaatcctgccacctctgcctcccaagtagctgggactacaaggcgtgaaccaccacacttggctaatttttgtatttttttttttctgtagagatgggggtctcaccatgttgcccaggctggtctcgaactcctggcctcaagcaattcacccgcctcaaccttccaaagtgctgggattacaggcgtgagccaccgcgcctggcctcagtcttttatctggtgggagctccataaatccatgctagctgaccggccagtcctctcccaggcaagtggccacagcgacgaaggtttggcggaggtgcagggggaggtgtggacaacgtacagtcacaaggcagcgtccgattcagtgagggtgactggggaagctgccgttcatgagctcttgtcaccaacttgggaagctgccgttcatatgctcgtcaccaaagtcaagaataccttcttctgcaccacattctcggagattttccaaatcccgggcattttcaggccttcactccctccactaataccccacagcttactcctcccaagtgaagaggccgagaaaagaatccattttatttgtcagaaccagccataaggtaaacaaatacaaagaaagtgtgtgctcgccaattaaacgggaatgcaggcttctggcggagacatgaccccatttttccattcgctccatgtcagtgaaccaccgtcacagagctggcccctatggcttgagggggaaaaaagagaaaggctttctacgtgtttctacatgccttttccacctcctttttcctaagaaaaaggcagaattccatttgacccaattcccattcgatggaaaagaagaacagagaggcaaggacgtgggcttcagcgtcacggaggcctgagtttaaacccttggatctatgacaacccactagccgtgaggttcaaagcaagtccaccagacctctccaagcctcagctccctcgtgtaaaacagagaggtctgtaactgccacacgggtcacggttgagaagcgtgccaggtacagcacatgctcaggagtgttcctgtctcctcaacttgggttcatacgacacggatggggcgcaggtaccgtacggggtacagagagggacagaaagcagggtttaagggacttctcatgcaataaaaaggaaaatctgtatcttacagcaggactaagttccacaagattagttttaatttataatctttacttctttgagacagggcctcgctctgttcctcaggctggagtgcaggggtgcaagcacagctcactgcaacctcgacctcctgggctcaagcgatcctcccacctcagcctcctgagtagcagggaccacaggcatgcatcaccactcctggctaatttttaaaatcattctgtagagatggggtctcgctgtgttgcccagtctggcaaagaaatcctgggcttaaaggatctggccaccttggccccccaaagtcctgggatgacaggcatgagccatcacacctggtctcagcaaggttttttgacttcaagaaaacgagggtgctcttaggtcttcagacaattgctattatcaatcatagcaaaaaataaaaaataaatacagctgggatgagagaggacattctagatgcatcagaacttacataaagattgacagaggccaggtgtggtggctcgcacctgtaatcccagcactttgggaggccagggcaggtggatcacctgaggtcaggagttcgagaccagcctgaccaacatggagaaaccccgtctctactaaaaatacaaaaattagctggacatggtggtgggcacctgtaatcccagctacccaggaggctgaggcaggagaatcacttgaacccaggaggtggaggttgctgtgagctgagatcgcaccactgcactccagcctgggggcgacaagtgcaaaacaaaactccatctcaaaaaaaaaaaaaaaaaaaagattgacggagccacttgaaacatctgactcagaagaaacaagaaccagaacgctgggggttctaagccttacagcacaaagagaaagacactaatgtttgtggttaaccgatggattgtggtcaggaaacaggttcaaatctcatctccaccacctgccagctatgtggcacttaccttctcaggaggattaagtgggaagacagagcagaaagcccagcgcctgcacgtgccacacttgccttctcaggaggattaagtgagaagacagagcagaaagcccagcacctgcacgtgccctgtgcttcagtgatgaagctaccgttgtcgaaacatactgaaaagctctaagccctgctacccgcagtgatcctgcatcggaggcaaaaagaccacaggaaggtagaaatgaatgagaaatgcagagagattggccggatgcggtggctcacgcctttcatcccagcactttgggaggccaaaacaggtggatcgcctgaggtcaggagttcaagaccagcctggccaacaaggcaaaaccctgtctccactaaaatacaaaaattagcctggtggtggcgtgtgcctgtaatcccagctaggagaatcgcttgaacccgggaggcggaggttgcagtgagccgagattgctccattgcactacagcctgagcaacagagcgagactgtgaaagaaaagaaaagaagaaagaaagaaaaagaaagaaagaaagaaagaaagaaagaaagaaagaaagaaagaaagaaagaaagaaagaaaaagaaagaaagaaaagagagagaaaagaaatgcagacagattaattgttggctgttgcagaatgcaaaatgaggaatgacactcgggtttcaagtctaaggctgtggatatttcggagcctggtgaaaagcaaagcactgccacgttttcccttcgctcccccaacctgccgtagatcacgtacccccactcacaaagagcacacgcccagtaccccatccctctcaccaggatgaagaaagacacccaaaacccaaggtccaaacttaggaagaaactgaattcaacacaacaaaagtcaacacctcatgtgtaaaggatcttaattaaacagtatcaagcatgccggcgtgaactcagtgtctggacctactcgttatgaaataaacttaagaataaatcccatctaagaacagaaaaaaaccagcaactctcatgcacatcaaatgctgttctcgatgatccttttccctctgaacatcacaaagcaccagcaggtgggagataattaaagtttgaataaaatttgttttatatgcctcagttggaacacttttgttccgcaaagctcttcccgctccagcccaaagatgcacccacaaagaaagaaatttttctttttgttttttgagacggactctcactctgtcgcccaggctggagtgcagtgacacaatctcggttcactgcaagctccacctcccgggttcacgccattctcctgcctcagcctccccagtagctaggacttacagacacccaccagcacgcccggctaattttttgtatttttttttttagtagagatggggttttcaccttgttagccaggatggtctcgatctcctgacctcgtgatccgcccacctcggccgcccaaagtgctgggattacaggcatgagccaccgcatctagccaagagttttttcaaaataatatttttctggatttttctggttacatctggggttttatgacttctgacagataagggtggaggaagtaatttacgaaaagaaacatctctcttgatccatatttacattccataagggagtgagtttggcttttggattctcctcccaggcctatcagggggatagaattcttgctcctatttgatgagatttatggggcaatgaggtctgtgaggctgatgctacaccacctgcttcacgaatacggcccctccatttgcaaagtgctgacttggaacatttgtatttttcccttacaaatcaatcaatctatctatcggtctgtctgtctgtctgtctatctatctatctatccgtctgtccacccatccgtctgtccgtccatccgtccgtccatccgtccatctcactctgttgcccaggctgtcacacagtggcacgatcacagctcactgcagccttgacatcctgagctcaggcgatcctcctcagcctcccgaatggctgggaccacagctgtgtgccaccatgcccagctaattttttgtagaaatgaggtctcatcatattgctgaggctggtctcgaattcctgagctcaagcgatcctcccaccttggcctcccaaagtgctaggattacaggcagtgagccactgcacccggcctaaatctctcatgtttataagaggtcatctgatggctttccatcccattcaaacacatttagcatccatatctgcctttaataaaaggtcataatacagccctggcatcacaaaagctaaccagagaacactgaggatatcagctcatgaagatactctgtctacaatgagactaggacaactgtcttccttttcagaaaaggaaactgaggcagtgagaggctatgatgcttcaacacgggggacctcaacccaagacttgtgcttttagttccatcacagatacatcagagactgtacttagttggggagtaacctaagctaacctcaccatgcacagcccaacagggaacctaagctaaccccaccatgcacagcccatcagggaacctaagctaaccccaccatgcagaacccaacagggaacctaaactaaccccaccatgcacaacccaacaaggaactaaggtaaccccaccatgtacagcccaacagggaacctaaactaaccccaccatgtacaacccaacagggaacctaaactaaccccaccatgcacaacccaacagggaacctaaactaaccccaccatgcacaacccaacaaggaactaagctaaccccaccatgcacaacgcaacagggaacctaaactaaccccaccatgcacaacccaacagggaacctaaactaaccccaccatgcacaacccaacagggaacctaaactaaccccaccatgcacaacccaacagggaacctaagctaaccccaccatgcacaacccaacagggaactaagctaaccccaccatgtacagcccaacagggaactaagctaaccccaccatgcacagcccaacagggaacctaagctaaccccaccatgcacaacccaacagggaactaagctaaccccaccatgcacagcccaacaattagaacttagggcattttaattggactcagacctcatgttctgaatttaagacggtgacagttacaggaatgtgtgtagggattatggctggaatgctgcctctcacttacagctgaccctcttcccaggactctccaaatccacctggtgcctctcttctgcccccgcacagccaggccacccctcatccaaacaccaggtttccagcactggagcctcacaagctcatccccacccacaaaacactcacaaacgcacctggcaagtcagtgtctgcatagcaggtctcgcagtctcagcactgctgacactttgctgggaaggggcggggcggggtggggtgtgtgggggggtgctgttccgcacattgtagaatgttcatcgctgtcccaggaaatgccagtaatgcccgcttagtgacaatcgaaaatggttccagaagcccaggagactttgagaccagtgaaacaattctgtatgatcccaacctggtggatgcatgtcattcattatgcattcgtcagaaccaacagtgtccaacacaaacaataaaccctaaggtaagctgtgaacttcagatagtaacaatgtacccataccagcccctcagttgtaacaaatgtagcgcaccaatgcaagatggtaatgacagcaggaatacctggagggcaagggaggggtacctgtgaactctgtactttctgctcagtttttctgaaaacctaaaactgttctatgaaacaaagtctatcaattaaaaatttaaagtcttcagacgtttgcctatgtccctaaagggcaaagctgttccacttggcagatgcggatgggagaacacgcctacgcaggccaagtctccagcagggcaatgctctcgttacttccacgagtcaatcagtgcagttgtatcaggccacgttcctggacagagactggaaaaggtgagctttctgagtgcgcatgggttgtggacactcctctgggggataatctttttaggggagaaagcatggagcccagtctcaggaaaccctaggcagaggctggagacagaggcctaatcctccggtcccagcttaaaagacagcaccttggttgctatattcactctggtgagaatgccctccttggatttccctttttcaaaaattatctccatcgctcagtagcgtgacataagaaatggaaagaagccttggccttcaaaaaaggccagaggaagcatctcaacgcctggaagccagaggaagcatctcaacctccggaagccagaggaagcatctcaactccctggaagccagaggaagcatctcaatgccctggaagccagaggaagcatctcaacccctggaagccagaggaagcatctcaactccctggaagccagaggaagcatctcaatgccctggaagccagaggaagcatctcaacccctggaagccagaggaagcatctcaactccctggaagccagaggaagcatctcaactccctggaagccagaggaagcatctcaactccctggaagccagaggaagcatctcaactccctggaagccagaggaagcatctcaacccccggaagccagaggaagcatctcaactccctggaagccagaggaagcaactcaactccctggaagccagaggaagcatctcaacccccggaagccagaggaagcatctcaactccctggaagccagaggaagcatctcaactccctggaagccagaggaagcatctcaactccctggaagccagaggaagcatctcaactccctggaagccagaggaagcatctcaactccctggaagccagaggaagcatctcaaacgccctggaagccagaggaagcatctcaaacgccctggaagccagaggaagcatctcaaacgccctggaagccagaggaagcatctcaaacgccctggaagccagaggaagcatctcaaacgccctggaagccagaggaagcatctcaaacgccctggaagccagaggaagcatctcaaacgccctggaagccagaggaagcatctcaaacgccctggaagccagaggaagcatctcaaacgccctggaagccagaggaagcatctcaaacgccctggaagccagaggaagcatctcaaacgccctggaagccagaggaagcatctcaaacgccctggaagccagaggaagcatctcaaacgccctggaagccagaggaagcatctcaaacgccctggaagccagaggaagcatctcaaacgccctggaagccagaggaagcatctcaaacgccctggaagccagaggaagcatctcaaacgccctggaagccagaggaagcatctcagcaccctggaagccagaggaagcatctcaatgcccagaacctgggggtcctgccgggggcagcctctgcagctctgccactggtgtccgcagggacgggcggagacatgacggaggcgccccaagaagacggtccccagttttgctaaactggctgctaaaatacccccttccatctgaaaacataattgagatgtgactgcctcaactttaaatccacttggcttcaggcatttgcatggctgaaacgtgggcacacccaggtccccgctggccgccttcatgattccctgaaatcctggctctccctgattgcctttctctctcatcctttcctttcaccctttccttttttttttttttttttttttttttttttttttttttttgagactaaatctcactccgtcgcccaggctggagtgcagtggcaccatctcggctcactgcaacctccgcctcctgggttcaagtgattctcctgcctcagcctcccgagtagctgggattacaggcacccaccaccacgcccagctaatttttgtatttttagtagagacggggcttcaccatgttggccaggctagtcttgaactcctgacctcaggtgatctgcctgccccagcctcccaaagtgctgggatgacaggcatgagccaccgcgcctggcccaccccttcccttcatagttcatcttctctaatggagagaggaagaaaagagggtacccaaagaagcaaaaaaatgagagaaaatgagagatgatcaaacataaaccaccatggggactgctgccatgacacagctgggtatggggagaaacagaattcagcaaccttctaaagctgctacaataatactttctggtttaaaaagacccaatgtggccgggcgcagtggctcacgcctctaatcccagcactttgggaggtcgaggtgggcggatcacagggtcaggagatcaagaccatcctggctaacacggtgaaaccccgtctctacttaaaatacaaaaaaaaaaaattagccaggcgtggtggtgggcacctgtagtcccagctactcgggaggctgaggcaggggaatggcgtgaacctgagaggcggagcttgcagtgagccgagatcgcaccactgcactccagcctgggttttgtttgtctcaaaaacaaacaaacaaacaaaaaaactaatttttcccaacatcattaattcttctcaacaatgtagtatcttccaaggtgaatcttttagtaaaatgggctttacaaactgttgatgggctgggggcagtggctcacacctgtaatcccaatgctttgggaggctgaggtggggaggattgtttgaggccaagagttcaagaccagcctgggcaacagagcaagactatctctacaaaaaaattaaataggctgggcatggtggcttatgcctgtaatcccagtactttgggaggctgaggcaggcggatcacctgaggtcgggagttcgagaccagcctgacaacatggagaaaccctgtccctactaaaaatacaaaaaattagccgggcgtggtggcgcatgcctgtaatcccagctactcgggaggctgaggcaggagaatcacttgaacccaggaggcagaggttgcagtgagccgagatcgagccattgcactccagcctgggcaacaaaagcaaaactccatctcaaaaaaaaaaaaaaaattaagtaagcaaggcatggtggcgtgtgcctgcagtcctaactactcgggaggctgaggtggattatttgagcacaggagtttgagattacagtgagctgtgatcgtgccacggcactccagcctgggcaacacagcagaccctgtgtctaaaacacaagaataaaaaacaaggaagtagaactattcccgtacctctccctgttgcctcgcacaccgtataaacttaccagacgttaactatcgtcttcgtgtttcaacttcgctttaaagtaaaatataaacatttattaaactatccagttctcccacttctcatcttagtcaccccggcccaaggaagtttttgtggaattgacagatgacatctgtttttacagagagttgtttctggtaatagaaccttctcctcgacttcaaagcttccctaaattctctacaatagacacttgaacctctgcagatctcgaagatgctaaaatggaccacgcggtcctgaccacccgcccccggcccctcaacaaactcacgctatttctcagttcctgcatatcacacacaatattcttctttttttcccaagccagtcccctcctaggcctgttgcagtgacgcctctcctaggaaagtccccgcggcagatacacggactccgtaatggaaactccggcgtgcctaacaacagcgtcactgtcacacacgcgtgagctttgacagccagggactggtaacccacggccaccgcgcccaagaaaattatttcccatgggagaaagaaaactacgttcagctcctggcaggtcccaggcaagtccgagccaggcttgcagggaggcgaatgctctgtcctgggaaagggaggcagaggttaagggctgttcccaccctccagtgacccagatgggaaaggcagctgcgtggacatcaaaatgacagcagagacgtgtggcttttccccagcgtcactgaaacaaagccagcatgggctgccccacactgtttacaggacaatcaattagcaagatggatctcatgattaagagaaactcaatttcttcttgaaagcacgttctagggtggggtgcatccttaccacatcagtcagatgtcaaaaggcagcacgtaaattgaataagggaaggaaaatgccgggcggcctcattcacgtccggcatgttccgctattattgaaaggaaattgagaaattagacagtactgcctattagcttcacaatgccccgtcctagggcaatccgcaaagatttcctcagtgtgctgtcaactctgtgttaaatgaattctcggtccagcatttgtttttcttttattcttttttcgagatggagtctcactctgtcacccaggctggagtgcagtggcacgatctcggctcactgcaacctcggcctccaaggttcaagcagttctcctgcctcagcctcccgagtagctgggactacaggtgcccgccaccacgcatggctactttttctatttttttcttagtagagatggggtttcaccgtgttggccaggctggtctcgaactcctcacctcaggtgatccgcccacctcggcctcccgaagtgctgggatgacaggtgtgaacccctgctgctggccagttaagattattttaaggataacttgatattgtgcacttcaaagttctccatggattgagctggtcaagcaatgcttaattttcaagtaactacccacctactgctgtgcctttcttccccacagccattcatctttgttcctgtcttcatggggctcagggtttctcaacctcagcacttggcggctggatggtttctccctggtcgaggctggtctgtgcattccaggatgtccagcagcactcctggtctttaccatccccccaagactggacaaacaaccctgggggaaaaactgccccagttgagaaccactttcctagttccatgcactctgctctcctgggacacacccctcttcagctcccctgcctggaacacctttgatcccatctttacctactaattcccactctgccatctggagctcgtccggacgccacctcctctgagaaactactctgaggccaggtgtaatgtctcacccctgtaatcccagcaccctgcctggaacagctttgatcttctttacctactaactcttactctgccgtcaggaactcgtccggacgccatctcctctgagaaactactctgaggccaggcgcaatgtctcacacctgtaatcccagcactttgggaggctaaggtgggaggaccacttcaggccaggagttcaagaccaggctgggtaagatggagaaatttcatctttacaaaaaatacaaaaattagccaggacggtagtgcacacctatagttccaagctgaggtgggaggactgcttgaaactgggaggtcgaggctgcagtgagccatgagggcaccactgcactccagcctgggtgacaaaacagactgtctcaaaaaaacaaaaacaaaacaaaaaaactactctgaaagtcatttcttcctatcccctccctgcaaagaaggaaggacagggctgggattctgcctctgtgcatgctttttttttttttctttttttttgagacagagccttgctctgtcgcccaggctggagtgcagtggcacgatcttggctcactgcaacctctgcctcccgggttcaagtgattctcctgcctcagcctcccgagtagctgggattacaggcacccaccaccatgcacagctaatttttgtatttttagtagagacgcggtttcaccatgttggtcaggctcgtcttgaactcctgacctcaggtgatccacccgcctcggcctcccaaagtgctgggattacaggcgtgagccaccgcaccccggcctgtgcatgcttttcttacagcaccttttatattaatagtactataactgtctccttactttgcttaatactccatctatccatccattaattcaacaaatattgacgtgctgggtacaaaaaataagaccctgagagagacacctggatgcccgctctcctgagctcatattctcgtgagggaggacgatcaataaacaacaataaacaagaaaatggcaggtattactgagagctgcaaagaagatacagcttgcttctctttcccgcaaggagatttagctccttgagggcaaagactgattcactcatgattatatcgtcaggaattagcgctgagccttaaaaaacaaaaccacggattccgcactttcctcctttctctcctctctgttacggagatttaggtacagggtttcttttcctgggagacagtaaaaaaagcttcctgcagggagggtcttgcccagttgataaattttacaagctgggggcggtggtgcacgcctgtagtcccagctactagggaggatgaggcaggaggatagcctgagcccaggagttcgaggctgcagtgagctatgatcatgtcgttgcaccccagcctgagtgacagagtgagaccctgtctctaaattaattattttcacaaaggaaatcaaagggcttttgttaaagtaaatgatatcctcaagctatagagtttaacactaaaacttttctgagggccgggcgtggtggctcatgcccgtaatcccagcacgttgggaggccgaggcaggcggatctcctgaggtcaggagtttgagaccaacctgaccaacatggagaaaccctgtctctactaaaaatacaaaattagcggggtgtggtggcgcatgcctgaaatcccagctacttaggaggctgaggcaggagaatcgcttgaacccgggggggcagaggttgtggtgagccaagattgcgccattgcactccagcctgggcaacaagaccgaaactccgtctcaaaacaaaaaaaggaaaaaaaaacacaaactttctgaagatatagccaaaaagctcatgaagagagacagcattttatagatggagaaatggaggcctggaaatggtgagctgcccaaggccacaatgccaggaacccagagctgaccatctggcttcagagcccactctcttccccaccagattcccacctcttgcaggaacagagaggcacgaggaaggtacaaacatcaggaggaaatctctttcctcccaggaggctgctggcaaaccatggcatcaggatcctcccagggtgggaagggagggtggtgagtttatttacaagcaaaatgaatctgcccgttcaaggagaagaaacatgaatgatactagtttttcaaattcttaccactgggactggccctaaactttagcactttattagaaagccaaaaaccactcaaaagctaacgtctacagagaagacggccaaaaaaaaagtacctttttttctcttcatggaaagttttctaatatttaaaagctcaggattattctgcagagacgttataaatgacccaatctgcagggctggaagcatcttctgggaggcaggggagttttgagagaaaagtgtggactttatgaaaagatagatctgcattcttttttttttttttttttttttttggatggagtttaagctctttttgcccagcctagagtgcaatggcacgatcttggttcattgcaacctccacctcccgggttcaagtgattctcgtgcctcagcctcccgagtagctgggattgcaggcatccaccaccacgcctggctaatttttgtatttttagtagagatggggtttcaccatgttggccaggatggtctcgatctcctgacctcacttgatctgcccgcctcggcctcccaaagtgatgggattacaggcatgagccacggcgtccggccagatagatctgcattctcatttgtatccaaaacccctctgagcctcaacgtcaccctctgcaacatgcagggatctgtggggggagatgatctctacatgaaatggaataacagtatctggcacaaaggcagacacttaatcaacgctagctcctttcctctccgcagtttattccggggaagaactctggcctgggaaacagcagacctggtccaactcccggctctgccagatcccaagtgactcaaatgcttcagctgccctgacctctgcttcctcgttactaaaatgaaaagcacgggatctacctccaacaacagtcatgggattcaaggacaccaggacacctcccccgtgaaaaccagggcaatgaattcaaacaaagcacattaactaaatctaaatctaaatcgatggcattttgtcccataaacactcagcctgaaagtctctccttcagcttgctgtttgtttttttgttttgttctgttttttggagatgggatatcgctctgtcgcccaagccgcagtgcagtggcgcaatctcagctcactgcaacctctgcctactgggtttaagtcattctcctgcctcagcctcctgagtagttgggattacaggcacccaccatcatgcccagctaatttttgtattttcagtagagacggggtttcgccatgatggccaggctggtctcaaactcctgacctcaggtgatccacctgcctcagcctcccaaagtgctgggattgcaggtgtgagccaccgcacccggcctcagcttgctgtttaaacatggtctcatgcagagccatctgcctgtgagctggacagccacacggtccagggttccagccctccaggctcatctcccaaaaataccctcgggtgtttgtcccagctagtgagtcaggactgaacctgataccagggaacagtgttgctgctgtcagggcatctctcgccagtttcattattcactgctcccactcgcacgacggacccacgtccgccgtccgttccagacataagccaacgctcgctctggcgttctcagaaaccgttccggtaacagaaaaagctttttaacttcccgtgagatccacgaggatccgtgaggttgatacttcaagtcgaaggcacgagaatgtccttctgaacctgaaaatcacggtgaaggtcctcgggacatctacatcgaggcagaaacagatttactagggagaaggcagtggagagaaaaaggcgacacaagaaaagatgctgcctcactgggccgtcctgccctgtcccctcccccaaaaggtgagcagagaaagctttttaaaggcaactgtcactcagtggcaatgccactggctttctaggacttactttcttccctccaaacctgtttacgaaggagacgtgaggaaaaaaggtaagagtcacacagaacaagcaccacgacagcccctcccatcatcagcccctcccatcatcagcccctcccatcattccatccaccaccctggtactcacactattttaacacaacacaatggcctctgcccatcattctttttttttttttttaagactgactttcgctcatcacccaggctggagtgcaatggcgcgatctcagctcactataacctccgcctcccgggttcaagcgattctcctgcctcagcttcccaggtagctgggatgcaccatcacgtctggctaattttttatatttttagtagagatgggctttctccatgttggtcaggttggtctcgaactcccgaactcaggtgatccgcccacctcggcctcccaaagagctggaattacaggctgagccaccgcacccagcctcccctcccatcatttcatcgaccaccctggtacccacaatattgaacacaatgtataactataataacaacaataataaaagcagctaacagttatgacgtgctcacctcttcaattctgctacaagtttttttgtttttttgtttttgttttgagacagagtctcactcggtcacccaggctggagtgcagtggtgccatcttggctcactgcaacctcctcttccagtgttcaaacgattctcctgcctcagcctcccaagtagctgggattacaggcgcccgccaccatgcccagtctctgttttttgatctatgcttttttttttgagacagggtctcgctctgtcacccaggctggagtgcagtggtatgatcacagctcactgcaacctctgcctcccaggctcaagcagattctcccacctccacctcctgagtagctgggactacaggcgtgcgctaccacacccagctaactttaaaattttttgtaaagacggtgttttgccttgttgcacaggctggtctcaaactcctgggctcaagtgatcctcctgcctcagcctcccaaagtgctgggattccaggcgtgagccaggacacccagcctctgctacaagttctatacatatgggctcacttagtacccacgacaaccctttgaggtattattatccccattttccagatagaacactgaggttcagagaggctaaggagctgccggaagtcatacaacgtattatgaccgcagccaaagggcctgacgcctgccttcattcagggtagaccaaatccccactggggcggccccctccgaagccaacctcaccccccacgggcagattcctaacaaaattcacgctcccttgtttgtggtaaaagtcactagtctgtggacaaggaggagttaaggctgcatttgtagacgcagaacctagttttctgagttttgtgggctgaagtcagacttgtagcattaactttaacgtaaatttttttggaggtgattcatgtagaattcctgccaagaattttcataattagactgaataaggccaaactctgtccgtacatgcctcaccgcgtcgactgccctaagagttcttctgcagccccagcaaagcctggggaagggctggccgagcggacttccaaaactcccaggttgtaagcgggccttgctgcggagagcgggacctgcgggctgcccggacgtcggacgccgtccggcttccatccgacagactggccccagttttatggtgccccgtggccacgaaggacaaaaggaaaggacgcacacgtcggaaaaagcttataaaacaagagcctttcccagtggcctcttttccgagggctgtaaagtctctctctctgatgtggtgattttcagcatttttcccctccactttgacccaacacattcccatcagtaacaggaactcacccacatggcagtattttttcgtttacttgtttgtttttgagacacagcctcactctgtcacccgggctggggtgcaatggtgccatctcggctcactgcaacctctgcctcccgggttcaagcgattctcctgcctcagtctcctgagtagctgggattacaggcgcatgcaatcacatccagctaatttttgtatttttagtggagatggggtttcaccatcttggccaggctggtctcgatctcctgacctcaggtgatctgcccacctcggcctcccaaagtgctgggatgacaggcgtgagccaccatgcccggcccttggcagtattttttacaggtaagggaagaatacacatctttactcctcacccttagagaagcagagtctgtatgacatgaagggtttggcaaagccccctgcaaggtctgtttcccgtcttctgctcctcttcacacacaagcgtgtgtgccacattcacactcctacacccacaactacggatctaacacacagtccccaaacatacactctgccaatgaatcaagacttacctggaaggctatgtcattaaaatcactggaattatattaaaattctaaaataggccaggtgtggtggctcatacctgtaatcccagtattttagaatgccgaagcaggcagactgcttgagcccaagagttcgagaccagctgggcgacacagcaagaccctgtctgtaaatgtaaatatatatatatatatatagatgccgggcatggtaatgcacacacatagtttcagctattcaggaggtgggaaaatccctggagcccaggagctaagaggctgcagtgagctaagaatgcaccaccacactccagtccaggtgacagaacgagatcctgtcggttaaaaataaaaaaagtgaaataaagaatgtataagtttcttaaagcagtcttcaaaacagaaagggaagtttaaagcaacctgctgccccaaaatggaggggtgctcttacaggctagaacgtagtaaaatatgagacatgttaccgatacaagacagaaatcatgctattgcaaaccacagaaaatagttctaggccagtgccgttcaatagaaatataatgtaagccacatgtatcatcttaaatttcttaacagtgaaaggtaaaaagggttgggcatggcatggtggctcacacttgtaatcccagcactttgacaggctgaggcgggaggactgcttgagcccaggagtttgagatcagcctgggcaacaaagcgagaccctatctctacaaaaaatttaaaaattagctgggcatggtggcatgtgcctgtggtcccagctactcaggaggttggggtgggaggatcgcttgagcccaggaggcagaggtcgcagtgagccacaatcgtgccattgtactccagcctgaactacagagtgagaccttgtctcaaaaaaaaaaaaaagaaaaaggtaaaaaggtacaggtgaagttaatcttaatatattttaacccaatacatctgaaacatgatcatgttgaaatgtaatcaatataaacgaatagtaataggacatattacattcctttcatcgtatctgggtctcaggggcctggtgcactttataccttcagtgcatctcgatgtagacttgcctcattctcaggtacctgcttcgcagccatgagaagctagtggcggcccctggaccacacagctctgggaagtggcaccatatagttaagaagtgtccagggttctacttacttctaaactgtgtatttttgaatgactggcctggaattaataaataaataaataccatgttttttaaagtttttttttaaagaaaaatgtctgtagttcccacctgcccgtttcctacttaaacagctctggtcaagtcacttaaccttcttgagcttgagggtcataaaactcaaatgaaggtgaaaaaatgccaacacaacttcctcacaaggctgtctcgaggctcatgtattataatgcagaaggaagtgttttggggtttttttggtttctgggttttttttttttttgagacagtctcactctgtcacccaggctggagtgcagcactgcaatctcggctccctgcaacctccacctcccgggttcaagtgattctcctgcctcagcctcccgagtagctgggactacaggcacccaccaccacacccggacaacttttttttttttttagtggaaatcgggtttcattatgttggccagtctggtctcgaactcctgacctcaggtgatccgcccacctcagcctcccaaagtcaggctgggattacaggcgtgagccaccgtgcccggctgggaagtgttctgtatagtcctatgcaaatgccagttattgctattccagttactttaagagactagatcatcctcaaacagcagcagcatcttttctttggtctataaacattttgcacacacctgtccttccttcccagaggcacaaaaacagcgagaaacacacatcaacagtcccctagtacagttaccatgtcagaagctgtaaacccactttacaagaaaaatctcagcccaatttccaagtaatctttttttgggggggcgggggagggttatctccaagagaattaattagactcgtaaacaaagatggagaaaaacatccctccttgcccgacccaacctatcttgttccctttcctgcagcctctggctcttcagaagggttagcgaattacctgtgaatttaggtgattgcttcttgcaatattttaggattgtgaggagaagtgatgtctcaatacctattttttttttttttttaaacagagtctcactcggtcactcaagctggagtgcactggagtgatctcagctcactgcaagctccgcctcccgagttcaagtgattctcctgcctcagcctccctagtagctgggattacaggtgcccgccaccacgccaggctaatttttgtatttttagtagagatggggtttcaccatgttggccaggctggtcttgaactcctgacctcaggtgatcctcccgccttggcctcccaaagtcctgacattataggcgtgaaaacactgtgcctggtctgaaatacagtaatgtttggtgggcccggcctggaatatggtaatgtttagcaggtgatttacccacagattggtccttttttcagatgtcggatctgtaggattctcaagttgacacaggcatgtcttcagacactgcaactttcataaatggccacaaaatataatggatggcagaaaacaagggaggtgggttctgtcctctcgaaaccagttgcatctatctttgttggcttcatgcttgaactgccaaagtggacattcggtggcccaggctcgctgccaactcatgtaatgggctcagcagcgctccgtccctgaacctgggaggtctcagttcaacctcccagagtacccccaagtctccctctctagagacacctgtggtctgttcaaaggcattcctgctttaggacctaaaggttccaagaaaaaaagggtcccaacattctgaaacagaacataatcataataagttttcctttcttaactgagtgttccccagagacggctcacagtaggggtgagctataaaggaagaacaatttcctcaattctgacccctgatttttctcctctggtctctaattgggttacttcaaaaacccatgttctagccgggcacggtcgttcacgcctgtattcccagcactttgggaggctgaggcaggcggatcatgaggtcaagagtttgagaccagcctggccaacatggtgaaaccccatctctactaaaaatacagaaattagccaggcatgttggtgggagcctgtaatcccagctacttgggaggctgaggcaagagaatcccttgaacctgggaggtggatgttgcagtgaactgagattgtgccgttgcactccagcctgggcaacagaacgagactctgtctcaaaggaaacaaaacaaaacaaaaaacccatgttctacttttttggaccgaagccattatggttaaaccaaatagtccacggcagtggatcccaaacatgtaccaaaggccccctggagagcgcttcagggttatcacaaagctccttccatcccatgagcaccaacaactgtcttcagaccaaaaattcaagactacaggtgccattaggtgtaggatccatgaaacctttgcctcatgttttaaacactgaaaaccacgactagcacttttaataatacactcccggctgggtgcggtggctcacacctgtaatcccagcactttgggaggccgaggcaggcagatcacgaggtcaggagtttgagaccagcctggccaacatggtgaaacccccgtctctactaaaactacaaaacaaattagccgggtgtggtggcacttgtctgtagcctcagctactcgggggcaggagaagtgcttgaacctgggaggcagaggtcgcagtgagtcgagatcacaccactgcactccagcctgggcgacagagtgagacttcgtctcaaaaaaaaaaaaaaaaaaaaaaaaaaaaacactccctgccagcagtctgtcctagtcaaacgagaggaacacatctcaaaatcttcttttaagtgacagaataatgaagattaaacaagaaacatcttgggttttgtttttcacttttaatctcataaaacattgcaaaatctgaaattacaaacacttataaagctaaacattacacaaccagtgctcggcatgaaacagagagattttatatttattcttctgtggtaccaaatagaggaatagcgttcccttagaataaagtccagtgtaacatttggacagacctgcactgttgagaaaaaacaatcaagccaccgaaaacctgttctgacatgagaatgttcacaaaagacagcacttctcgacttctgctgataaacttgtgttccaaaggaaatgaattttttttttttttttttttttttgagactgagtcttgctctgtcccccaggctggagtgcaggggtgcgatctccgctcactgcaacctctgcctcccgggttcacgccattctcctgcctcagcctcccgagtagctggggttacaggcgtgagccaccacgcccggcctaattttttttatttttagtagagacggctttcaccatgttagccaggagggtctggatctcctgacctcgtgatccacccacctcggcctcccacagtgctgggatgatgggcctgagccaccgcgcccggccggaaatgagtcttaagcaactgctggtagtgatgcctctgaagtggactaacggaaaacagcgcgtgacagaggacaacgtcttaaaaaacgctggtgagtgatatcgcctttaatatctatatctatccactatggatcttatgaaagaatcatgaaatacttctaacataaaggcagtttatttgccaagagaacaatcttaaatctcctaaaagctccatccagttctaggttgaagcaacatcctacacctcctaaatcaaacaacctatgactcaaattctaatcttggccaggcctggcagctcacgcctgtaatcccagcagttggggaggccgaggcaggcggatcacctgagaccaggagacggagaccagcctggccaacagggcgagaccctgtctctactaaaaatacaaaaatgagccaggcgtggtggcgggcacttgtaatcccagctactcagaaggctgagggaggagaatcacttgaacccgggaggcggaggttgtggtgagccgagatcgcgccgctgcactccagcctgggtgacagagtgagactccattaaaaaaaaaaaaaaaagttctaatctttgtaagtggcatagacagacaaagtgttttccaaatgctgtaggatatatattttttaaagctctcaatgcataatattgtctggagggtttttatttgttttttagaagaatttatcatccgttccaagttagagttcacttgctacaaatgctcagaactgatgatgtttttttaaaaaagcaacatactttctacgtacagcattattgctccaatgaattaatgccaacaaatgtgctcggtattgcttccagattcttcaagtaactgtactccttggaatggtcaacccagtcccatctgtccttgattacttaatttgcagtcaccggggagttcaaaatgacttttccacagtgaagatggaagcacacctgggcagcagaacgagtgatgtgggctcagctcacagaccttctcacacagggatgtaacaggcggcagaaagaaggaattccctccccgcgagaaggcttgggaaggacagtctccatgttccgggagactctggactttaaggaagattccttcctgctctagcttatcttttttagcttttttttaaagtattttttttgctgattaactccactctgccaatagtgtgtcctctcaaaggactccaagttcccacagtgcatatgtatccaattttattgctttgcacttgatatacggctttgtaactgctcaaggcatatttttgtgaacattatgtttctgtctcccatactctaccctaagcttcttaacaataaaaatcatgccctgcccctgcttgggatttttaactatgactgcattaaatctataaattaattttaaagaaatgacatctttacaatattttgtatttctagccaggaacagtctgtttctccattaatgcaagtcttctttttttttttttttttttttgagacggagtctcgctctgtcgcccaggctggagtgcagtggcgcgatctcggcttgctgcaagctccgcctcccaggttcatgccattctcctgcctcagcttcctgagtagctgggactacagacgcccggctaattttttttgtattttttgtagagatggtgttttaccgtgttagccaggatggtctcgatctcctgaccttgtgatccacccgtctcagcctcccaaagtattgggattacagccgcccaccaccacacccggctaatttttgtatttttagtagagatgaggtttctttcaccctgttagccaggatggtcttgatctcctgacctcgtgatctgcccgcctcagcctcccaaagtgctgggattacaggtgtgagccacagggcccggccaatttttttttttttttaatgtctaaccaaagtttcatagttttctccaactataaaaacaaaatatgcacataaaacatttcacgtgagtctttctccctccccagatcccagtctggccctcaggtaatcccctcagttaagtaacttccagacgatattcatgcatatactttttttttttttttgagatggacagtctcactctgttgcccaggctggagtacagtggcgcgatctcggctcactgcaacctctgcctcccgagttcaagtgattctcctgcctcagcctcccaagtagcagggattacaggcgcccgctaccacgcacggctaatttttctatttttagtggagatggggttttgccatgttggccaggctggtgttgaactcctaacatcaagtgatccaccctcctcagcctcccaaagtgctgggcttataagcgtgagccaccacacccggccaaatactctattttttaatccacattcggttgaaaaaaatctgtgtataaatggaacggtgtagttcaaaccaacgttgtttgagggtcaaccgtatttgtaagatctgttgagaaattcccagaaattggactgacaggtcaaacggtccacacatttttaactgtgttaaaacactgccaaagacaccgcatcagattacgctcccccaaccacgcgggagagaccccgtctacatccttgccaacactgtatgttatcaaatgttccttttgccagtttaataatcacatatttcaaaagttgtacttctttaattgcaaacagaaccaggcatcttttcatgtttatgtgtctttctctgttcaaattctttacccaaattgattttaaaagctctttatgcattaagaaaaaaaacaggccagtgggcagtggctcacacctgtaatcccagcatgaagattacatttgggaggccgatgcgggcggatcacctgaggtcaggagttcgagaccagcctggccaacatggtgaaaccccgtctctactaaaaatacgaaaaattagccgggcgtggtggtacgtgtctgtaatcccagctactcgggaggctgaggcaggagaatcgcttgaacccgggagatggagcttgcagtgagccaagattgcaccaccgcactccagcctgggcgacagagtgaaacaaggaaaggagaaaagagaaaggaaaggacggaaaaaagaaagaaagaaaagaaaaatagcacttttctctgtcatatacgttggaaatatcttttctcaccctagggtttatcatttgatctggtttctggtattttggaccatatagaagttttatattacagtcatctcttttatagtcaccaataaaatctagattaattctctgaacataaatagaggctaacttcttattaggagaagtaaaattgaacagaaaattcatgagtcaccaaaaatccttcccgattttgtaaaatctggaaaagccaacagttgatcaccaaaccactgccagctcccaaatgacagaactcatccacagagcacccccacagcccaggatggcccattttctcctggagtctgaaaagtccattcgcttgtcagttttccagagtctgggaaccctttttgcctctagcgctggcttagctgtttcaacacagaagtgatcacagatgaagatgtcggcccctgcccacagcagagactcctcaacacgacagacagagagcaacaggctgagaaaggagagtcggtcagtttcccagagacatcgtggcacaacagagaccaaaggaaaagaggataaggaggcaggttctccacctacccccacgtccccaggcaatgcagagaccgggaaccgataaagaggcaggttctccacctacccccacgtccccaggcaatgcagagaccgggacccttctcagatgacttttctctcctggcacctgctctttcttatccttgtagtaaaagagcagacaaaaatgaagcagaaaaaaaatgtgtaaacaattgccctttccatctacactggcataaactcacttacttaagtgcaaggacattcattataacggcgtgtcctcccaaactcgcggaagatttttattttattatttatttttatttttatttttgagacagagtctcgccctgtcgcccagactggagtgcagtggcacaatcttggcctactgcaacctccggctcctgagttcaagtgattctccagcctcagcctcccgggtagctgggactccagacacccaccaccacacccagctaatttttgtatttttaatagagacagggtttcgccacattggccaggctgctctcgaactcccaacctcaagtgactcacctacctcagcctcccaaagtgctgggattacaggcgcccgccaccacgcccagctaatttttgtatttttaatagagatggggtttcgccacgttggccaggctggtctcgcactcctgacctcaggtgactcgcctacctcagcctcccaaagtgctgggattacaggcacccgccaccacgcccagctaatttttgtatttttagtagaaatagggttttaccgtgttggccaggctggtctcaaactcctgacctcaggtgatccacccgccacagcctcccaaagtgctggtattacaggcacaagctaccacgcccggccagaaggaagattctttttaaggcgagaagtatgcaatgagacagtagaggcaaggtcaaaggcaaacaccgaggtctgtaattggtagcgcaagcaaggttcctagaggagacaggaatatacacaattcaacaaacatgtatgaaatgctaccttgtgctgagcatcgaaccaggcggagacaaagatgaggagcagagactcgcttctgaccttcaaagagtccacagtccattgagtgaggtcattaactcagcaagcgagttaacagggagcgtaccgtgatgtgggaagcaagactgttgggtgtagaggaggcggagctggatgtggggaaccagggcttcccctggaggagctgatgagtgcgtggaaccaacagcacaggcaaataaagcaagcaagtgagatgagttttcctaaaatattaaagggggtgaaatcgcagacacttgtactggaaaaatttcagagttgatttttttttttagacaaagtctcgctcgccaggctggagtgcagtggtgcgatctcggctcactccaacttctgcctcccaggttcaagagattctcctgcctcagcctcccaaatagctgggaatacaggcacccgccacaacgccaagctcattttttgtatttttagtagaaatggggtttcaccatattggccaggctggcctcgaacttctgacctcgtgataggtccacctcagcctccaaaagtgctgggattacaggcgtgagccactgcacccggccagttgaggattttatagttgagaataagtgggattatgattagcatgacctctaggaattctttctctctttctttctgagatagagtctcactctgtcgcccaggctggagtcatctcggctcactgcaacctccacctcctgggctcagacaatcctcctgcctccgcctcccaagtagctgggactacgggagtgtgccatcacacccagctaatttttgtatttttttgtaaagactgggttttgccatgttgcccagactggtctcaaactcttgggctcaggcaatcaacctgcctcagcctcccaaagtgctgggattacagatataagacaccacacctggactctaggaaattatttctaagaaaggagtaaaagtgagaatgaatgagtacatagtgtaacgcttccgagctttggtgcaggaggaaagtaaataacaaggataccccagggctggaaacttggcaataaaccaagaaggcagagaccagttagtgcaacactaaaatgcctgaccacttatggggccagagctggggcttccaggtgaaacttcccctaaaatgggcggccacttatggtgtcagagccgaaacttcccctaaaatgggcggccacttatggtgtcagagctggaacttccagctgctccccctctcccagttcttttgtccttgtccctagagttttggtctccaagcaatcggttctgtgtttttgtttgtaggctcaattttaaaccacattttgtaaaggcacttctcaaaaggcaaagataaaaacactgaagctcttaagagcgcctgtctggctgccaagccattgttctactcaaatgtcgaatgaaaagggagaaacagaatgatgattgtatttgaattgcttccaaggaaaagtaacctccagcaaaactctaggcccactttgctagaaatcctggcacgtcggcaacagaaatggaggcagaaaattgcatctttcagaaagcagagtatcaaacaggaaaagccacaaggagtgaggtgctgtgaggttcccgtggtgcaggatccattttatcctttctacttcttcctgctgaaaatgagattatttaaaacaatttaaaagacaattttccctgcaaggggccttttggaaatgagtcaaagtcaaatcccttgttttacgtaaaattaacgtatgacatttcaaagttaccaaactaaaaaaaaggaaaataaatataaacacattccaaaacttaaaaatgaaggagatttcagacagtccctcctggtaaaatgtgaaattgcaccccagctgcagtagctactgtaaatatccaaggaatcagttttaagtgtttggggatcccagggatccctgcaaagcactcaggattttaacattaagctcacaaattacagcagctggccgggcacggtggctcacgcccgtaatcccagcacttttggaggccgaggcaggtggatcacctgaggtctccactaaaaatacaaaaaactagccaggtgtggtggcggacatctgtaatcccagccacttcgggggctgaggcaggagaatcacttgaacccgggaggtggaggttgcagtgagctgaggttatgccattgcactccggcctgggcaacagagagaaacttcatctctaaaaaaaaattacagcaaccaacaggcctctaggttagttaccaccctaacctcttcgttgtaaattttcaaaccaccttgaaggtgggtatttttggtgggtctttatcttcattcattaatcacattatcagacattccctgtgtgtcctgttctgttatacatgctgaagctacaaatcaaacatccgctttgcctccaacaagattccctgttcctaagtgaaccaaggaatgaggtgttccacgcctgagctcacatcttttttttttttttctgtagcccaggctggagtgcaatggcgcgacctcggctcgccgtggcctccgcctcgcgggttcaagcgattctcctgcctcagcctcccgagcagctgggactacaggcgcccgccaccatgcccagctaattttttgtatttttagtagagacggggtttcaccatgttggccaggctggtctcaatctcttgacctcgtgatccgcctgccttggcctctgaaagtgctgggcctctgaaagaacaggcgggagccgccgctcacatctttactcatgaacctaaactcacagagcagccccacactgtcgtctgtggaaaccacaccagctcctcctcttccttctggacctgctgtcccaccctacgcccattttttatctccacccactctttgaacttagcactggtgtctacaggctcgattcccagctctcccacaaggacgtggctcagacgcacgtcaccatctcaacccaatgtaggccacccgctgcaggcgagcttccctacccaatccgacctcctagacggacaccccaggttccagccctacaaggggcgcgtactggcacaacaggcgggcgtggctctcgctccccaggaaggcctcgcagaggtggggacaagggcggatgggaaaggggataagcgacaggagaggggggactcccgttccaaacaaaggggactgcgtactggtgaagaagaatgtggtctgtattcagttttgttgacaagaacccctaatggataataataaaatgtttactgagctcgtactttatggaagacacatggctcacggcagggcccggcacatcacaaaaactcactccgtatttgcagcataaaggaaatctcagtttcagttttaaaagttgtgtgtctaaaccagaaaataactcataacatgatcctactaagaagatgggccaaaaacagacaaaagaaacacgagaacactcaatatcacctcccccaaaacaacacagcattttcctcctgtaatcaaacaatcacaaaccaggctgtgctgggcctggccgttgtgccagaaacagccccagaaccctgggcccaaaggggtctggtcttgattaagattattttcctttgtaacgttcggtttggaggaaaaggcgggagggtcggaaggaaatgggaggagcgcacgatccatcagcgagtttcatcgcagcgtttcatctccttcgtgaactgggctcagggaggccgtgactcccatttccatttggctcccgagtcaatcactcactttcattccagctactttttgtcttaatttcttgacttaaaaagggtttggttgaggccgggcgcagtggctcatgcctgtaatcccagaaagtgaggccgaggcgggcggatcacctgaggccaacagttcaagagcagtctggccaacacgatgaaaacctgtctctactaaaaatacaaaaattatccaggcgcggtggtgggcggctgtaatcccagctactcaggaggctgaggcacgagaatcgcttgcacccgggaggcagaggctgcagtgagctgagatcgcgccaccgcactccagcctgggagacagagactcagtctcaaaaaaaaaaaaaggccgggggtgggggggcgggtgtttgttgaatccttggtgaatttaaggactcagaaaacaaagtaagttaaactacgtttccacagcctccttcctcattaaaaatgtctctgcagccaggcaaggtggcgtgcgcctgtagtcccagctactcgggaggctgaggcgggaggatcacttgaggccaggagtttgaggctgcagtgagctatgattgcaccactgcactccagcctgggcaacagagtaagaccctattgctttaaaaaaaaaaaatgtttcagccaggctcggtggctcacacctgtaatcccagcactttgggaggctgagggtggatcacgaggtcaggagatcgagaccatcctggctaacatggtgaaagcccgtctctactacaaatacaaaaatcagccgggcgtcatggcgggcacctgtagtcccagttccttgggaggctgaagcaggagaatagcttgaactagggaggcagaggttgcagtgagccgagattgtgccactgtactccagcctggtgacagagtgagactctgtctcaaaacaaaacaaaaaaaaggttctggaatgattattccaattaaacagcttttattacaatactctgtcaatgcagggcaatcattccttaagatgctagaaaacgtgttattgtaacacgaggaaaaagccctgtaatctcagcacaaccagaaattaaagtggcagttttgggaggacgcagtcaaacggctttctacagcacctcctcgtatcgtgggttacagaacctacgtcgtcctcggaatccccgcattcgtcccacgcggccctcagacacgggctctggttcaaggtgggagacagagacaacaccaatcagcccttaccaggcagtgcgtggctccagaacaacaactgaaaataatattggaacgcagtccagaaaatacaactaggggcagagcggtccggcacaaaacaccaggaaacgctctcccttccatcattcaatcttggcggaccacactggtatgcgacctcatctagctacatagctacacctccctcttgtcaccttgcagactggtattcactaacccccaggccatggcggaaaatgtaccttccatctctctctgcctcagcccccaccggcacccttggtgccttcatcacccatccagagcaactacccacttccacggcctcctccatgtgaggacctccgcctccaactctcttcgagccaccacgcggtgcaaatgtttgtatttttggtggagacaaggtttcgccatgttgcccaggctggtcttgaactcctgggctcaagcgatcagcccatctcagccgcccaaagtgctgggatgacaagcacgagccatcacgcccagtctacaccccgaaatccaacattacaaacttatcaatgctgcctcctgtcatctccccccgcccctggctcccgctttgacctggaggaatctggcaacgtcaacatcaagtgattgttcaaattcagccaagggggccgatgaggtgcccatgtggctctcctcccagccccgagcgcctggggatacctaggccctcctgtcatgccccaaggccaatgtagccttggggatgccgagcctgcctgatcccaattcctccagcgttctcctcccagggttccgctccctccccaagtgaccagccctcaccagctcactccagctctgcagcgttctcccaggctctcaaccctcgacgctcatccaggttcattcgccatccgtatgccctagcccagggtgggtctcatcaactgtaccctcactggcagcacccaggacgttctcaatgaggtcttcattcataccgccttgccaatcgccctcaaaatcacctggaagattccaccgttcaggaagccttttttttttttttcctttgaaacagagtctcgccctgttgcccaggctggagtgcagtggtgggatctcggctcgctgcaacctctgcctcccgggttcaagcgattctcttgcctcaacctcccgagtagttgggattacaggcgcccgccaccatgtccggctaatttttgtaattttagtaaagacggggttttgccatgttagccaggctggtcttgaactcctgacctcaagtgatcctcccaccttggcccccaaaagtcctggatgacaggtgtgagccaccgtgcccagcctctatgtgacctttatatgtttcttaacctctttgtgactcagttttctcatttgtaaaataaagagaagagcatctatatcacagctttgtagtgagagttagacgggacggcgttcagccaccctcagagcagcggctggcacacaggggagccccttcctctgctcactccttcctcttcctccacctacagggtcaagtctttaccactcaaaaggtaactgtttatccccaggcaacctctatgttcctctggctcagccccaagctccctgactcaccacagcctcctcctaccccggctccctctccgcactcacaagccggctctcagcggggccaccaacaacacccagcggaacccgtcatcttgttccggtccacggcgccccctgaaactgctgctttccatcttttcctcgaaacgcttcccgcacctctcctggcccctctgcatctgtggcttgtccttggtcccctacgccagcccctctgcctgcccctgaatgctgggggtgatggtttcacccttggctttctcctcctgtcccgaagatgagtccatctgctccagcacgctagacaacacctggccggcccaggctctcatcctcactgcccctggacaacacctggcaggcccaggctctcatcctcactgcccctggacaacacctggccggcccaggctctcatcctcactgcccctggacaacacctggccggcccaggctctcatcctcactgcccctggacaacacctggccggcccaggctctcatcctcactgcccctggacaacacctggcaggcccaggctctctccctcattggccactggcatctcttctgggctctacctgcccgcagtctcacctgtatcccaagggaacctcaaactcaacatttctaaaattgaggttaccgccttcctccaacctgcttctccctctgtatttcttatatagactgaagacatcgctgtcaacccagctccccacatcaaccctttggtagtagactgggcaaagggcctcattctaagaaacccttttcagcgggtaactgtgactttgttggccaacagaaacgggttagccctgtattcagggatatgacttaaagctgtaagaattggccaggcacagtggctcacgtctgtaatcctaacactttgggaggccgaggcaggtggatcatttgaggctgggagtttgagaccagcctggccaacacggtgaaacctcatctctaaaaatacaaaaattagctgggtgtggtggcgggcacctgtagtcccagctactctactcgggagactgaggtaggagaatcacttgaacccgggaggcagaggttgtggtgagccaagatcgtgccactgcactccagcctgggcaacaagagcaaaactccgtctcaaaaaaagaaaaaaagaaaagtgtgagaaccattagttggaaataggatggggccacgaataaaatctaagcgtacattccaaaatcaagagcttaacaaaagacccagttagcctgaggtacagaaccaggaggtgctcaaatctggggctgagagccagagagacgtcagaaggtgagaagtgcccagccaggactccactctgcgttctttgttttgtttttgagacggagtcttgctcagttgcccaggctggagtgcagtggtgcgatctcggctcactgcaacctctgcctccggggttcaagcgattctcctgcctcggcctcccgagtagctgggactacaggtgcccgccaccacacccggctaactttttgtatttttagtagagacggggtttcaccgtattagccaggatggtctcgatctcctgacctcatgatccacctgccttcggcctcccaaagtgctgggattacagacgtgagccaccacgcccggcccactctgcattcttacaaggtgccgtgtgtggctcccagggcctgagctgggagcccagagtcttcatctcctccctacttctcacttcaactcgacttactcacctcccaagttctcccggactctgtctcctgttttactttccttgacagcattatccacgagttcaggacttctctttgccttagggaccaccacctggacggcgcggtggctcacacctggaatcccgacactttgggaggccaaggcaggaggtttttactacaacatctccaggcagggcccttgtcttattcactctgtttacatccacctgggtgccactccagtgtttcgcacagaaaaataaccacgttggtgcaattacttgtgcaccaacttaaagcaagaccccgctttacaccaaaaaaattttatattagtcaggtgtgttggcacatacctgtagtcctagctaccccggaggctgagacgggaggattgcttgagcaagtctaggctgcagtgagctgtgatcacaccactgcactccagcctgggcaacacagcgagaccgtgtctcaaaaacaaacaaaaatttttaattaattttaaaataaaggccatcccatccaagcaaaaattggaaaatgtaatgttcaacaacatatccatatagtcactatttgcagacctgcaacgtgcaggacactgcgtccagcattggggacaggtcctcacagagtttacgctcttgtaagaaaacagacatcaaatatccccaaaacatatgtaactagaaactttgataagcagcataaaagaaacagataggacacaagtgcgtttgataccagaaggacaacctcatcgggggtcaggaatgatgaaacatcaagcaagagtgaagatgaaacacttggtaatatttgatgagcgaggagaatattcgtgagatagttaagtggaaacgacaaaacgacaggtatatagttaaaccccacttttgtatttttttaagtatattttacagaagaaaggaaagatatacaaataaagtgcaaaatgttagcagtggggaggtttatgattcctatattctagtgcttttctacatttttcaaattctcaaaaagtttttttttttttttgagacagggtctcactctgttgcccaggctgccgtgcagtggcacgattctgggctcaagggtcttcccacctctgcatcctgcatatctgggaccacaggtgtgtatcaccaaacccgactaattttttattttatttatttgggacagcttatttatttattttttgagatggagtttcgctcttattgcccaggctggagtgcaatggcgcgatctcggctcactgcaacctccacctcctgggttcaagcgattctcctgcctcagccccccgcgtaggtgggattgcaaggcgtgagccactacgtccggctaattttgtatttttagtagagatggggtttcaccatgttggccaggctgctcttgaactcccaacctcaggtgatccgcccacctcggcctcccgaagtgctaggattacagggatgagccactgcgcccggccgatttttaatttgttgttgtgatagaacatacataacagaaaatgtcctatttcaagtgtgttccggtggaccgtcctgcagcattaggtgcatctcctgttctgctaccatcaccaccatctgtctccagaactttccatcttcccaaactgaaattccgtcctcagtaaagactaactccgttccgttccgttccgttcccctgctccccagccccagcccttggcagcaccaagcctcattcagttttaaaatgcaaacattcaaagaccaagcctcattcacaccttcggtgtaagttactttcatctgcgaaactcccatcactcagaaaggaatgcccaggtaaaggcaggaagtacaggtacacagagctggagacaggcctgggtggcaatttgggatgggggttgggagaagagattttacaagtcagatgggaaggaaaagtaactatttgctttgaggtttggcccagggccttgggagcagccggcggattcaggtgtaagaactagccaccaaaagcctctgcatctcttgttcaaagctgattgtctcaggtttgactgtctcaggctttggtgtctcgcagaagcaccaaaggagaggacagggaggaagaaagaaggggtggaaaggagatacagagacttaagtcaagaatgaggcctcccgcctcccggaaagcaaacctaggaatactcttgacagctggtcacactgcacctgcctgaacaagtccagtgacgggtacaaggaggccccaacattccagagaagcacatccaggcagcttcagaaaccccaaacccaggaacacagaggaggctggagaggcttctggctttttcctgattgactgactgagacagagttttgctcttatcacccaggctgtaatgcaatggcgcgatctcagctcactgcaacctccgcctcccgggttcaagcgattctcctgcctcagcctcccgagtagctgggattacaggcgcccgccaccatgtctggctagtttttgtagttttagtagagacggggtttcaccatgttggccaggctggtcttgaactcctgacctcaggtgatccgcccgcctcagtctcccaaagtgctgggatgacaggcgtgagccactgtgcccagctcctgatctgtggtggttgttgctgctgttaatgtctcacctctcactacaactccccattcaactttctctaaaaccacctcactcatacaaacgttgccctggctcaagcaactgctaaaatgctcacgaacgtccctgttccccaagaagtacatggtgggcttgctcccagcacagcaaaaagtcatcattccagtctttagtttatccaaaactccctttctctggctaagagctatcacttctttagataatctttgctttttcttccctgatatcaccaatagtagcagctgattctcgttgcaaaagagccatttttcacaaagaaagttttaatgacttaagagttagcagctgggctgcaatgcaaatctatgtcttagcagaattatgacctgtcaggaatctctgggatggatgaaagctctcaagattcaagacaatgttagatccgcacattctcagtatctaccgtctctgtctctatttttctcctccttccctctttcaagagacggatctcactctgtcacccaggccgtagtgcagtggcaccgtcaatggctcactgcagcctcaacctcccgggctcaagcaatcctcccactccagccctccaagtagctaggactacaggcatgcaccactacacccggctaatttttttattttttataaagacagggtcttgtcatgttacccaggcaggtctcgaactcctgggctcaagcgatcctcccgcctcagcctcccaatgctaggattacaggcgtgagccactgtgcccggctctcctcccctctcttttctctttattaacaggagtatcccatgttttttgttttttttttgtttttttgttttttttttgagacaaggtctggctctatcgcccaggctggagtgcagtggtgcaatctcggctcaccacagcctctgcttcccgggctaaaaccatcctcccacttcagcgttccgagtagctcagaccacaggcgtgcaccaccacgtcggctcatttttgtattttttgtagagatggggtttcgtcatgttcccaagctgctcaaactcctgagctcaagcgatctgcccgccttggcctcccaaagagctgggattccaggcgtgagccaacgtgtctggccatcccacacatccctgggatttgtagaacaaggctctgggtaatgaaagagtctggggataaacacttttgcccatctcccatccaatgcagccaagaaaactgttcataacaaccctgggaggtgagtcagtgatccaatgggaggctggaaggagtatagaaaagggaggtaagagaagcaaaagtaaggccaggtgcggtggctcacgcctgtcatcctagcactttgggaggccgaggtgggcggatcacgaggtcaggagatcgagaccatcctggctatcatggtgaaaccccgcctctactaaaaacagaaaaaattagccaggcgtggtggcaggcgcctgtagacccagctacttgggaagcggaggttgcagtgagccgagattgtgccactacactccagcctgggcgacagagactccatctcaaaaaaaaagaaaaaagaaaagaaaagggaggtaaaagaagcaaaattaggactgggtgctgtggctcacacctggaatcccagcactttgggaggccagggcaggcagatcgcttgagctcacaagttccggaccagcctcggcaacaaggcgaaaccccgtctccacagaaaataaaataatcaggcgtggtggtgcacacctgtggtcccagctacttaggaggttgaggcaggaggttgcagtgagccaagattacgccattgcactccagcctgggtgacggaagtaaaaccttgtctcaaaaaaaaaaaaaaaaaaagcaaaagtagccaggatggtttgcaggaggagcagaaggaggcgggctcagtgggagatggcccacgtaaccagtcagacagcgatggtttgcgggaggagcagaaggaggcatactccgtgggagacggcataaccagccagacagcactggctctcagaggcagagaacaaaagggacgggcttagagggagaagtgaagcccatttcaaaagaactcctagagacagccgtgcccactcgccccctcaccagcttttctttaattactgagtctgcacgtgatgttccttataccacctggactctcaccaaccccagctgcttgtgttaacaaagtcaacctctctgagaatctgggctggtggtcattagcaaagagaggcgaggataaacatcctagataaagggaaaccacagattgtaaacttgaagaggactctggccaagaatctggaggagttacttaattcacagggttgtggtaagggactaatgagaatgcagacgaaggtgttttgcaaagaaagtgccataagcatgcgtcactaggaaagctgatgtatgagcagtctgcaaagtgggggtctcaagagcacagagtccaggcagcgggggtctcagccacagcaccacctctttaaaaagcgacacccagctaacttcacatctcattccaaagagtggcagtttgggtaacgtgctctgccaagcacatctgacttcatcagaaaagcattcggtgagatttcctatggaatccttgtggacaacatagatccacaggctggataatgtgaactggtaactggccaaccaccacacccctgaagcttggattagtggatgaataccattaacctagagggaagtttctcactgtgttctaaaaagatccattctggctgtgctcatctcaacattatccttaattcccttgaaaaagtactggaaggttgggcgcggtggctcacgcctgtaatcccaatactttgggaagcggagacaagctgatcacctgaggtcaggagtttgagaccagcctagacaacatggtgaaagcccatctctactaaaaatacaaaaattagccgggcgtggtggtgggcacctgtaatcccagctactcgggaggctgaggagggagaatcgcttgaacccgggaggcggagtttgcagtgagccgagatcatgccactgcgctccagcctgggtgacagagtgagactctgtctcaaaaaataattaaggaaataaaagatactggagaataccgctcacatgtgcagatatcaagaagactagcagatgagcaaatggcctaaacgcgtaatcagctgtataaatgcaatacacatcataacttttaggaactgtttgcaattcacacttaattcccacagagtaaagccgaggccttaaattagtgaatggcatatgtgctttgtttggctttgcccaatgtcaagaaaaattttaactggctaacagcatgtaaaacttaactagcttcacataaaaacccagtttgttagcttgaaaaatcagaagagctggcaacgtcggccttcattacggcaacaggcagctggaggtgagcgccggctttccccgagggctggctgcggccctccactctgtcccccaccacctggcccaggccactcgcttcacctgcctggccctctactggcatttgagttggtgagtcctgcaggaaaacactggttcacgttattaaatatgtccaattggctacacgttttgactgtgcacgaaactccagctcggtcttcacttacagcttttgcaggtttagctcctgtagcaagatccaacatctgatctcacagcttcacaatgacaacctgtctgtgaagaacatcccagttttccagtgtgcccccctaccctctggtttatttaaccttcccaatattccaggaaggctgggcttattgtccaaaatagaagggcgatcaaccagctaacaggaactaaaaccgggatttcaactcaggacttgggttcaaccttagcttagcatttcccaccatacctaccacgcatccctcaatccctggaggcggctctgattccagactgacccaaccggaggaggctcaagtccaggttgcaaagcagctgggctgctctggaaagagcgtttggaatccttgcttcacttccgtttttaatcttcttaaaaaaaactgtgtagtagtgtttaatccaaagacagctgattcccatttacacgtaacctgttgaactcacatactaaattttaaagctctgctctcgaaaatgcagtttgctctttaagatctccttggtaacacatctaactggtatctgaactacagaaaaaaaaaaaaaactttggaatcaatcaatgacgggggttagaataaaatccaactcaggaaagtaccgaagaaagttccagaatgacagctgtgtagccgacccagagaaccacctgtgtctggaatggaggaggactggtaactcccaggaaaggggactctccaagttaaaaaggggactcaggctgggtgcagtggctcacacctgtaatcccagtactatgggagactgaggcaggcagatcaccgtgaggtcaacagttcaaaaccagcctggccaagatggtgaaaccccatctttactaaaaatacaaaaattagccagtgtgatggcggatatctgtcatctcagctactcagcagactcaggcagaagaatcacttgaagccgggtggcggaggttgccagtgagttgagatcgtgccattgcattccagcctgggtgacagagcgagattccgtctcaaaaaagaaaaaaaaataccacttgaacttgccacaaacaatatttacagacacaacaatgcccctattgattgactggctgattttcaactacacacaaagcatgaatcccggtgacacaacacaatgtaaatacgaacaaccttgacaaagctaaaggtacaaaaaataggaaggaagtgcaggagacctgatgggcaggatagaaagacaccaacgttcccaaagtcctattgaaggataaggagtaaaggcataaacatgttattaaatgctaaaagtgtaaccaggaaaaccgtaaatggtggtataccaagaggacaaagaaagttgagtttgctttttttttttttttagacagaatctcgctctggttgcccaggctggagtgcagtggtgcgatctcggctcactgcaacctctgcctcccgggttcaagtgattctcctgcctcagcctcctgagtagctgggactacaggtgtgagccaccacgcccagctaattttgtatttttagtagagatggggtttcaccatgttggtcaggctggtctcgaactcctgacctcatgatccgcccgactcagcctcccaaagtgccgggattacaggcgtgagccaccgcacccggctggtgagtttgcttttaagggagctaaatcgatctctagcctagcagaaaaccaacacataatgttgaagttcgccgggtgtggtgtcgcacgcctgtaggcccaacgacacaggaggctgaggtgggagaattgcctgagcctagcaagtcgaggctgcagtgagctgagatcgcgccactgcactccagcctgggcgacagagcgagactccatccaaaaaaaaaaaaaaaaaattagctgggtgtggtggtgtgtgcctgtaatctcagctactggagaggctgaggcagaagaaatgcttaaacctgggagacggaggttgtagtgagcagagatcacaccactgcactccagcctggtgacagagcaaggccctgtctcaaaaaaaaaaaacaagaaagataaagtcatataataagcctatgtatactacttgattttgttttcgccataagcacatgttatttattttaaaaaaatttttggccgggcgcagtggctcacacctgtaatcccagcactttgggaggccgaggtgggcggatcgtgaggtcaggagatcgagaccatcccggctaacacagtgaaaccctgtctctgctaaaaatacaaaaattagccgggcgtggtggcaggcgcctgtagtcccagctactcgggaggctgaggcaggagaatagcatgaacccgggaggcggagcttgcagtgagctgagatcacgccactgcactccagcctgggcgacagagtaagactccgtctcaaaaaaaaaaaaaaaaaaaaaatttttggccgggcgcagtggctcacgcctgtaatcccagcactttgggaggccgaggcggggggatcactcgaggccagtagatcaagaccagcctggccaagacggtgaaaccccatctctactaagaatacaaaaattagccaggtgtggtggtgggtgcctataatcccagctaatggggaggctgaggcaggagaatcgcttgaacctgggagacggaggttgcagtgagctgagattgcaccactgcactccagcctgggcaatagagcaagaccctatctcaaaaataaaacaaaacgaacaattttagaaatgtttaattatttggaatcctggaaaaaaaagctaaggcaaagctgatctgaagagtctgtctacctgcccagctaccaacccaaaccggccttgttttggtcctaggcggcggttcttaaactctggtccctggacgtacggcttccgggttgcctgggaactgttgctagaattgcaaactactgggccccagcctggacctaccaagtcaagaactctgggatggggcccaggaatccgcatttaaccagtccttctggttattcatcagtttggaaaccgcaggtcttcagcaaaacaaaactctgaggcggcgttgggtccagtcgtcgtctcctcagcgagtaaggcagcttcaggggaaggcctgagccccttctaagaaaacacaggctggattttaaaggatctctagggctagtttccccaggttctgggcccctgccctgtgtgagctctagtggggtcagcagcaaggacccatcaccggaagaggcttctgagaggcaccgacttttgccatcagtgggcagcgagtgggctgtgtggtccccggacaagcagctgagtgggtggggagtgccttgttgtggccggcttcgcataagtcatctgcgcccgccaccacgccaggctaatttttatatttttagtagagatgaggtttctccatgttggccaggctggtctcgaactcctgacctcaggtgatccgcccgcctcggcctccctcagtactgggattccaggcgtgagccaccgcgcccagcccagcccgtcctcttgaacctgctcagtttcagtcgtcatgaccacttgtaatatcccttcccactaacatcaaaggctgtggcccgaagctcccaagtgggcgaaaaagtcccgagaggttccagaaggcaagatcattctggggccacgaggaccgagaaacgacacaaccaaccacagaacagaaaactcttgtggatctgatgtgattctgtactccagatttgcagttaccacttacagaagccaacgtccacctctgaaacacagaaccccctaactggtgcgaggcagctgaagacaaagttgaggcctttgggagaagagctcggccagaggaggaaatctgattagtaaaaagataggcagccaagaagtaaattaaatgaatgctcacagagaaagcactcgagacaggagcgggagagactccgggcacacatcgcgacagggacagaaaagctttcaggatgggggtgggggaaggggaagaactggttttctaatattagactcacgacatgctcacttcccaaatcccagccaaaatgagggccccttgactccgacaagcccaggccaccttctgcttggatacacactttctgcaccaggactctgcgtgaatgccaaggcaaattccatccctctcaactccccaccgcaacaccaaatgactcacacagcttatcttgaaattccccctttcatcttggcctcccactaacttaaaacaatgcaataagaacacattcaagacacctccagtaaatccatatccgtattattcacgaggcactaactagaaagctgtttatcctgaagcctacgtggtcaactttagaaatgtgccttcgtgtaagctggtttttataaaataaataaaaagcctccacaaataccagaacacttatcaatttggactaaagtcgtggattccaatacaagcagccaaggtcctcaagcctcaagcataaacatcccttgccttttattaattgaaaaataaacaggaggggaaatgggtggcatgcctcactatgtgatttaaaacaaatgacacgatgttctcaaacttcaattaatttttaaaaaggcattttatttttcactttatgattataaaagtcatacatgcagactatggggaaatttagaaagtacaataagaaggccaggcgccgtggctcacgtctgtaatcccagcaccccgggaggccgggcgcggtggctcacgcctgtaatcccagcactttgggaggctcaggcaggcggatcacgaggtcaggagattgagaccatcctggctaacacggtgaaaccctgtctctactaaaaatacaaaaaaattagccgggcgtggtggcgggcacctgtagtcccagctactggggaggctgaggcaggagaattgcgtgaacccgggagatggagcttgcagtgagccgagatagcaccactgcactctagcctgggcaacacaacgagactctgtctcaaagaaaaaaaaaaaaagtacaataagaagaaaacttacttctggaagtaagagaagtatagaaagtcatttctggaaaagacgctgaattggtgacttacagtcaagaaattcccaagtctggccaaattccaacccaaattctcggccaggcacagtggctcatgcctgtaatcccagcactttgggaggccaaggtgggtggatcacctgaggtcaggagttcgggaccagcctggccaacacggtgaaaccccatctctactaaaaatacagaaattagctggtcgtgatggcacgcacctgtaatcccagctacttgggaggctgaggcaggagaatcgcttgaacccgggaggcggagggtgcagtgagccgagatcgtgctatttcactacagcctgggtgacaggaagacgccatctcaaaaaaaagaaaagaaagaacattcttttagcccagtcccaagcggactgtctggacagagtcctcacttgctgccactcattattgcatcattttgctgtgctctttatttttttttatttatttattgttttttgagatggggtctctcaccctgtctcccaggctggagtgcagtggtgtgatctcggctcactgcagcctccactacccaggttcaagtgattctcctgcctcagcctcctgagtagctgggatcacaggtgcatgcactaccacgcccagataatttttgtgtttttactagagacagggttttaccatgttggccaggatggtctcgaactcctggcctcaggtgatctgcccaccttggcctcccaaagtgctggaattacaggtgtgagccaccgcgcccggccttgctgtgctctttaaacagccgcaggactctgctccaattccttcgtatctgggaatcctctggcacaaaacccccacctcctatatcatgtggtctgtgtgacagccagaaaccccccagctgaagaacactgagaagtgggaggcttccgctcggtcatggccggcgggacaaggagatgcttaaaggtctggcaaggttgtaggaaaagaccaagacacttcaggatccagctttaggatgtgctggcggctgcaacaaacatgcactctgatcaatgagctctgcgctcattcactccacacgtgtttactgagcgtctactgtgtctaagaccctgagctctgcagaacacgcccaggaatcacagaaggagcttgctctgagagctgggagagcctgctattcatgcgggtattgactgttgccatcctgcagaacaaagccagctttcataacatcccactagataccatgccagccacatccttgcctggaataaaacctgcagcctaggccgggcgcagtgactcacgcctataatcccggcactttgggaggtggaggcaggtggatcacctgaggtcgggagtttaagaccagcctgaccaacatggtgaaacccagtctctactaaaaatacaaaattagctggatgtggtggtgcatgcttgtaatcccagctactcaggaggctgaggcaggagaatcgcttgaacccaggaggtggaggttgcggcgagccaagatcgtgccactgcactccagcctgggcaacagggcaagattccatctcaaaaaaaaaaaaaaaaaaaacctccagctcctgcttgtgcttccatcgattgtcctccaaaagatggctggagtgtgtccctctcaccagcacgccactcgattcaacctatggactcaagacacgccatcgggctcaatgctgtggggcctggtggaagcaacctcctgttgttagaccagaaacgtcccctgcgacaaagcctttggttttgctttgtgttcttctcccgtggggtggaagagccgccctccctctgaggcactgcagcgacgggtgccctggtgagtgtccacggtgaggtggtgagtgtgcaccacacacaacccggccagcatctgcccaggtcaagcccatcctgtcagtgcacacgccgcgtgctgccaccacccagctcgatgattctctccttccacaccttccggtccccaaaagtgactgaaagcaggattctgctgcggaaaaactggacttggaggaagggcaggagagaagggcgaggtgtgtcggcctgcctcaggtctggggtgcccaattctggttgtgcaaacagtgagggaaaaaaagggtgctacgatgtctggctaaaacggggcatcagagctgtcggcggtaccagttttcagaatccatggatttataacggatttcttttctaacttgcaaacgcatacgagatacttcacagaggtattacagttaagtcacacttccccacataagctcacctttaatgaaaaagttaaaatgacataaaactgggagtgttccagaaaaggcaggcctgtgttcaccatcacaacacctatggatagaaaagaggcagaaaggccgggtacggtggctcacgcctgtaatcccagcactttgggaggctgaggtgggaggatcagcttgaccccaggaggccgagattgcacaaccgcattccagcctgagtgacacagtgagactctgcagcctttactgcagcctttgcctcccgggctcaagtgatcctcccacctcggtgtcctgagtggctgggattacaggcacccagcaccacgcccggctgattttttgtattttttgtagagatggggtttcatcatgttggccgggctggtctcaaactactgagctcgggtgatccgcccgcctcggcctcccaaggtgctgggtgcattttttcttaaggaagaaaaaggagggcagggggcaaggtgcagggcaaaaaagaagagcccaggagtccaagagggaagcggccagaggaaacggaaggaatcagcttccaacagggacccacaaggctgcttgagaactcaggacacaaggaacacacctggagaagggggctctgcggtgatccgtacacagtgagaaccaaaggggcagcttcagggaaaacaggtggggagggacaaaaggagggaaaagccaaaactctccgtcatcgagaggaacgcacacttctccgaggctattgccggttcaagctcgtttccttcagaacacacccccaaagttcctggggtccccccaccgccctccccaacacacacactcactccaatttcactcttttctgcacagattccagggaagtatcctggagacagacatcaaaggcatccgagctggcagcccacaacaggtcacgctgtcacggggacgccgggaaccacatgaaaagcagagaattcacggggcgttcgatgatgatgattattttttaaggagctcagaaatgtctttcgtttcagttttagtttaaggacagctacctctgggggaatggctttgaagtcacatagcccagagcagcgctcagcagccacgagggaagaaaaacgctgcgcccagcggaaaggccacaggagccacggggcgcaggggccgtcgctgaagaagaacccagaaggcttctgcttttggtacaaggacaggaaggaagaggaatggctgcagctgggaccacatttgaaaacccaccaaggccaaccttgcaatggccttctgcgtagcagcaaatacacagaggttaaggggcagaggccccaggagaaccctgtgaatatgcctattcggaggggtcagggtcagaggacaaaagaggccggagaggaacaagctttccacttgggcggttttactgctccagaaagcagtttttgaaaagcacgagatgatgggaaggcccaggtcggcggttagatctagagcaggcggcaagagcttgccctgatatgacagcaagtgagctggccacaaacacagctcacagctagtgcgaaggccgagccaaagaaaaggtccccagcccggccgggcgcggcggctcacgcctgtaatcccaacactttgggaggctgaggcaggcggatcacgaggtcaggagttcgagatcagcccagccaacatggcgaaacccccgtctctactaaaaaaatacaaaacttagccgggcttagtgacgagcccctgtagtcccagctacttgggaggcggaggcaggagaatcacttgaacctggggaggcggaggtcgcagtgagccgagattgcgccactgcactccagcctgggtgacagagtgagacactgtctcaaaaaacaaaacaaaaaacaaaaacaaaaagaaagaaaacaggcaaaatcaaaagaaaaatgatgaaaaagaagataaaattaagaacagaacaggctgggcgcggtggctcatgcctgtaatcccagcactttggtaggccgaggcgggcggatcacttgaggccaggggttcaagaccagcctggccaacatggcaaaaccccgtctctactaaaaattagctgggtgtggtggcgggctcctgtaatcccagctacacgggacgctgaggcaggagaattgcttgagcctgggaggcagagactgcagtgagccaagatctcaccgctgcactccagcctgggcgacaagggtgagactccctctcaaaaaaaaaagaaagaaagaaaagaacaaatgaaaggaaaatgagagctaaaaatataacagaatctttgacctagcaattcctcttctaggaatttatccttagagaaccaccaaagatgtgcacagagaagaatataaaaacaagtttataacagcgctggttattccagcaaaatctggaactggcctacatttcctatcataggaaactggaaactattaaatatggtacatatatacacatagacagatagatacagcaaaataccacgtaactattagaaatcagctttttttttttttttttgagacaagagtttcactcttgtcacccaggctggagtgcagtggcaccatcttggctcactgcaatctctgcctcgcaggttcaagtgattctcctgccttatcctccccagtagcagggattacaggtgcccgccaccacgcctaattaattcctatatttttagtagagatggggtttcaccatgttggccaggctggtctcaaactcctgacctcaggtgatcctcccaccttggcctcccaaagtgctgggattacaggcgtgagccaccgcgcctggccagagatcatctttttaaagaatacgttcttacatgaaaatacactcaaaatacatcctaattgtgtaagacacacacgtacgtgcctacataggaaaagacaaggctgccttgtgatgtcggaacatccatgcttctagctagggggtctgcaggagactgatcccccacatgctttttttgtattcgatgatccattattactttttaaaaaatataatttgcaggcatgagcaacactgtggcgggccctgcagtggggcagggagagtgcagtcaactcccgcttccagtattaccttttttttcttattttttttttgctgtcatccaggctggagtgcagtggtgtgatcatggctcactgtagcctcaaactgccgggatcaagtgatcctcccacctcagcctcctgagtagccgggaccacaggcacaggccaccacgccagctaactaatttttgtatttttttggtagagatcgaggtgggggggtctcagtatgttccccaggctggcctcaggtgatcctcccacttctgcctcccaaagtgctggaattacaggcatgagccactgtgcctggcctcaatttttttttttttttggtctctttctccccctttttgtggattatagggtttcgctatgttgcctaggcaggtctcaaactcctgggctcaagctatcttcccatctctgtctccttaagcgctgggattacaggcgtgagccattgcacctggcctcaatattacttttaaaagaggaaactatcccaatagatgttttggtaaaaagaaggaaaaagggccgtgggcaacttccaaacgcaatgtctctgttaaaaatcaattccactgaggtcaaaagcccctaacgaagacatcacccagaccctttcaccactcagaaccaggtacggacggcatgcctcatctcacaacagcccagcgggctttgcaggacccttaaaaacaagattccagggcacagccatgaactcacatcacaccttcctggatttacagtgaacaagattccagggtgcagccatgaattcaccaaacaccttcctggatttacagtgaacaagattccagggcgcagccatgaattcagatcacatctccctggatttccagtgaaatagattccagggtgcagctatgaactcacatcacaccttcctggatttacagtgaacaagattccagggtgcagccatgaattcaccaaacaccttcctggatttacagtgaacaagattccagggtgcagccatgaactcacatcacaccttcctggatttacagtgaacaagattccagggtgcagccatgaactcacatcacaccttcctggatttacagtgaacaagattccagggtgcagccatgaattcaccaaacacctccctggatttccagcgaacaagattccagggtgcagccatgaactcacatcacaccttcctggatttacagtgaacaagattccagggtgcagccatgaactcacatcacaccttcctggatttacagtgaacaagattccagggtgcagccatgaattcaccaaacaccttcctggatttacagtgaacaagattccagggtgcagccatgaattcaccaaacaccttcctggatttacagcgaacaagattccagggcgcagccatgaattcaccacacacctccctggatttacagtgaacaagattccagggtgcagccatgaattcaccaaacacctccctggatttacagcgaacaagattccagggcgcagccatgaactcacatcacaccttcctggatttacagtgaacaagattccagggtgcagccatgaattcaccaaacacctccctggatttacagtgaacaagattccagggtgcagccatgaactcacatcacaccttcctggatttacagcgaacaagattccagggtgcagccatgaattcaccaaacacctccctggatttacagcgaacaagattccagggcacagccatgaactcacatcacaccttcctggatttacagtgaacaagattccagggtgcagccatgaattcaccaaacacctccctggatttacagcgaacaagattccagggtgcagccatgaactcacatcacaccttcctggatttacagtgaacaagattccagggtgcagccatgaattcaccaaacacctccctggatttacagcgaacaagattccagggcgcagccatgaactcacatcacaccttcctggatttacagcgaacaagattccagggtgcagccatgaattcaccaaacacctccctggatttccagtgaacaagattccagggtgcagccatgaactcacatcacaccttcctggatttacagtgaacaagattccagggtgcagccatgaattcaccaaacaccttcctggatttacagtgaacaagattccagggtgcagccatgaattcaccaaacaccttcctggatttacagcgaacaagattccagggcgcagccatgaattcaccacacacctccctggatttacagtgaacaagattccagggtgcagccatgaactcacatcacaccttcctggatttacagtgaacaagattccagggtgcagccatgaattcaccaaacacctccctggatttacagtgaacaagattccagggtgcagccatgaactcacatcacaccttcctggatttacagtgaacaagattccagggtgcagccatgaattcaccacacaccttcctggatttacagtgaacaagattccagggtgcagccatgaattcaccaaacacctccctggatttacagcgaacaagattccagggcgcagccatgaactcacatcacaccttcctggatttacggtgaacaagattccagggtgcagccatgaattcaccaaacaccttcctggatttccagtgaacaagattccagggtgcagccatgaactcacatcacaccttcctggatttacagcgaacaagattccagggcgcagccatgaactcacatcacaccttcctggatttacagtgaacaagattccagggtgcagccatgaattcaccaaacacctccctggatttacagtgaacaagattccagggtgcagccatgaactcacatcacaccttcctggatttacagtgaacaagattccagggtgcagccatgaattcaccaaacacctccctggatttacagtgaacaagattccagggtgcagccatgaactcacatcacaccttcctggatttacagtgaacaagattccagggtgcagccatgaactcacatcacaccttcctggatttacagtgaacaagattccagggtgcagccatgaattcaccaaacacctccctggatttacagtggggtggcccggcactagaccctcctcccttccctgcaccaacatacttcatcgttttaaaataaccgtcggtttcttaaggtaaatattaatgttagcccctgcgcaggcatcatcattctctctctcgactaaaatgtttgtgaactttaaatctgtcaactgaggtgcttgtcctgcatgaagttacccagcgaaccaccgactcccagctctgtatgaactacccaggttcgaggacctccagagaaaggtcaccaacagggaaaggaggctccacggaggtcgactggccagagggttctaaggtcacagagggaaggcccagagaggccccgagtgatgacctcaagcacgtctgttccccacgtgccgtaactttctaagttactctgcccagccttgagatcccaaaaaaaagtaacatctggtcattaaatcatatctttcttcaaaagaatattaccgggctgggcacagtggctcacgcctgtaatcccagcagtttgggaggctgaggcaggcggatcacttgaggccaggagttcaaaaccagcctggccaacatggtgaaaccccgtctgtactaaaaatataaaaattaaccgggcttggtgatgcacgcctgtaatcccagctacgactcggggggctgagacaggagaactgcttgaacccaggaggcggaggttgcagggagccgagatcgcgccactgcactccagcctgagtgacagagtatgactccgtctctaaaaaaggaaaaaaaaatggtgaagacagtaaattatgttatgtatattctaccacaattcttaaaataatgttttttaaaagttgtttaactcgacaatccttctcctaaaaaaaaaataacaatatttggccgggcacggtggctcacgcctgtaatcccagcactttgggaggccaaggtgggtggatcacctgaggtcaggggttcgagaccagcctggccaacatgacgaaaccccgtctctactaaaaatacaaaatattagctgggtgtggtgacgggtgcctgtaatcccagctactcgggaggctgagacaggagaattgcttgaacccaggaggcagaggttgcagtgagccgagatggcgccactgcactccagcctggaaaacaagagcgaaactccatctcagaaaaaaataaaaaaataaaaaataccagctacgcagcctgtttattaagcttccataatgagagcttccaatccaggtgatttgtgttcctgtctcgtccatattggccccaaactccaagatcaaatacgcttctctgacttcaaagctgaaggtttccgcaggtccgtacccccgtccgaggactgcctccaactggagctgttttcccagtcggctgcaaaggccctgcgctgtgttcaccaagcgtggggctccctctcagctgagcagatggcaaaggggcaaatgtaaggtagattctgtttgtttatttgtggcaaatagctctgaaggaccagcccttttttcctctcatctctggcaaatcattcagttctgaaaaagttccttggccagcaagccagccggtaggaggagggcggagaaaaccagaaaggggaagaaactccttcctcatctccacctcaaaaacaccaagctttgttttgggattccagtgagtttgtatccctcactcttggaaattaaaccggtagaaaaatccagaaaaacttgggcagaggtcaaaaattgttaaatcgtggccaacggggtcagtgttttctttcaagcaggggccacactgagggaagatttaaaaaccaacaataacaaaccgtggaacacctacgaactgtgaaacacaccgagaagagaaaactgggtacataatggatttttctaaaatggggtaggattttctaaaaagggctccgcagaggagaattctcacaagggttgcctccgtcatcaacatgccaggcaagtgcatggaggatggtgggcagcaagtatttctctttattttttatttttgagacggagtctcgctctgtggcccaggctggagtgcagcggcacagtctcggctcactgtaacctccgcctcccgggttcaagcaattctcctgcctcagcctcccgagtagctgggactacaggcgcccgccaccacgcccggctaatttttgtatttttggtagagacgaggtttcaccatgttggccaggctggtctccaactcctgacctcaggtgatccactcgcctcggcgtcctaaagcagtgggattccaagtgtgagccactgtgccctgcccccaagtggatcttaaaaacaaccctggggaatagataagagtttcccccatcctggctaacatggtgaaaccccgtctctactaaaaatacgaaaaaaattagccgggcgtggtggcgggcgcctgtagtcccacctacttgggaggctgaggcaggagaatggcgtgaacccgggaggcagagcttgccgtgagccgagatcgtgccactgcactccagcctgggcgagagagtgactccgtctcaaaaaaaaaaaaaaaaaaagtgtttcccagatgacagagttagatgttaaacatcacaaagtcggtggatattaaatgtatgattgttttcatatctttagccccaaaataataaatgttcagtggagatgtccaaagccaggcccaatgcctggggagcttccactgcttatctctctcctgaatccagagtattctgcccttcacagaagtgctgatcgttcagagataacccaccaatcaggtgtgcctttagggttaggccagcaaaccacaggctgccagcaaaccacaggctggaaactgggaatgtccttggggtcctggggccttggctgttctcaccctttcggccacaaaaaggctctttcttggctgccagagaccctccctggggtagagagggagaaggagagggaaagggagagagagaaagtgagttgggggagctgggtaactaaaagacaaggagttgatgtattctaggcgcttgaaagttcagaagactatctcttttttttttttgagatggagtctcgctctgttgcccaggctggagggcagtggcgcgatccctgctcactgcaagctccgcctcccggggatccctgctcactgcaagctccgcctcccgggttcaagcgattctcctgcctcagcctcctgagtagctgggattacaggcatctgctatcgcacccagctaatttttgcatttttagtagagatggggtttcaccatgttggccaggatggtcttgatctcttgacctcgtgatccgcccgcctaggcctcccaaagtgctgggataacaggcgtgagccaccacacccggccaaaggctgtctcttctaattactgaggttttagaaccattttcctcaactctccctcttgcaagagtccgtagtgggtgtgctcaagacctgagcttgagttatcatgcccactaacgccctggctgagaagttcccaccaaaagacagcggtgacatttgcttcccaaaagtcccaaaaccacgctccccgttagcctcggcgcctcacagggaaaaagaatcggctctggagggacgaccccccgcagcgggcgactgtaccgctgacgggctcggccagcacatctccgcatcgctgggcctcagtgtcctcacctggaaaatgggggtgatcacgccaacgtcacagagtccttgggagaatgaaatgaggcaatgcctagaaggtgtctccactgcagtccctggcacggggaggttgcagccttctgtggcagccttggctggttatcacgcagttcacagcttcagggccagagcacagatcctggttcagccacgtatcagcagcacaaccgggaaagccagtcggccccacggtgcgtcctccaggggccgcatgaggagagacgatacacgccagcactcagggcccagcacgggccccccactcagtgaaaagcatcctctcactcttaggcttgtcatgatcatgcaccggcagcgtccccctcggttacgaaccccattctagatgacaaagcactagtaacccacgtacagtagtggctgaaaaaccgtcacaggaatcatcctcagggccttcgaggtcacaagcgtgacggggacgcgcaggtgctgatgtgagatggactctgtatgtgaatgaggctaaaagactcactttcctaaatattatgggcagacataatggggctacacaggcattgagctgattttacacagttatggacaatgggccctctgtacccacaggttctacatccacggattcgactaaccccaaatcaaaaatattcagggctcggcgtggtggctcacacctgtaatcccagcaatgcaggaggccgaggtgggcggatcacttgaggccaggagttcgagaccagcctggccaacaaggtgaaaccccatctcaactaaaaatacaaaaattagccgggagtggtggcacgtgcctgtaatccaagccactcgggaggctgaggcaggggaactgcttgaacgcaggaggcaggggttgcagtgagccgagatcctgccactgcactccggcctgggcaacagggtgaggctccctctcaaaaaaaaaaaaaaaaaaaaaagggccaggcatggtggctcacgcctgtaatcctagcactttgggaggccgaggcgagctgactgtcttgagctcaggagtttgagaccagtctgggcaacacggtgaaactccgtctctactgaaatacaaaaaaaaaaaaaaaaaattagctggatgtggcagcgtgcgcctgtactcccagctactcgggaggctgaggcaggagaattgcttaaacccgggaggcggaggttgcagtgagcagagatggcaccacagcactccagcctgggtgacagagactctctctcaaaaacaaaacaaaacaaaaaaatcagtaaaaagaattttttaaaaaaatgtaaaaatacaaataaaaaataaaatacaacacagcataacgactatttacatagcaatgtattagatgtattaggtattactcataatacattgtattaggaattataagtaatctagaggtaatttacagtacacaggattaccccatttaccctggtgtgatgatcacacgttgtatgcctgtatcaaaatatctcacgtccaccataaatatgtacaccataaaaattaaacaataaagaaagaaaacaaaggaaacaaaacagaaaaaaaagaagaaaataataaagtaaattggagatgtacacgggttatatgtaaatgctattttatatcagcaactttggcatcacgggatctgggtactgaggggtaggagcggccctgggaccacctgcccacaggcactgagggacggctgtggaactgtacagggcccggccctgcgctggggacctagcggtgaacaagcagcctgggaaaggaatgtttaaaagctcccgggcgactgaagatcagccaggggtgaaaaccatcactcggtgcttcacggaacaaacgcttgaggcaaaacctaagacagctgggtcccaacgcggggcctcaccccggcccgtcccgccccagcgctcggaggctgagagcagcattctcagatggtactaaatccacatcccgggacacgaggaaacagcagggccagggcacggcctcctcctctccccgcggcctcctcctctcccccctgcctcctcctctccccgcggcctcctcctctccccctgcctcctcctctcccccctgcctcctcctctcccccctgcctcctcctctcccccctgcctcctcctctcccccctgcctcctcctctccccgcgggctcctcctctccccccgggctcctcctctccccccgggctcctcctctcccccctgcctcctcctctccccctgcctcctcctctccccgcggcctcctcctctccccccggcctcctcctctccccgtggcctcctcctctcccccctgcctcctcctctccccgctgcctcctcctctccccgcggcctcctcctctccccgcggcctcctcctctcccccctgcctcctcctctccccgctgcctcctcctctccccgcggcctcctcctctccccgcggcctcctcctctcccccctgcctcctcctctccccgctgcctcctcctctccccgcggcctcctcctctccccgcggcctcctcctctcccccctgcctcctcctctccccgctgcctcctcctctccccgcggcctcctcctctccccgtggcctcctcctctcccccctgcctcctcctctccccgctgcctcctcctctccccgcggcctcctcctctccccgctgcctcctcctctcccccctgcctcctcctctccccgcggcctcctcctctcccccctgcctcctcctctccccgctgcctcctcctctccccgcggcctcctcctctcccccctgcctcctcctctccccgcggcctcctcctctcccccctgcctcctcctctccccgttgcctcctcctctccccgtggcctcctcctctcccccctgcctcctcctctccctgctgcctcctcctctccccgcgggcctcctctgttaggacccacctccctgcctcagtctggaaaggggcagccacgtgaggacctctgagaccctggagagccactgggctcagcctggagcagtgggggctggggtgggaagacgccatgcattgttcagccccagcatctgcctgggcaccttctggtaacagtcatttggccagcagcttctcgggggctaacggtcaatgccagaagcaattagccccaggtcctggtcctccttggagccaaaacaattagtaggctgaagacagcctgatgcttaagaaatcacttttttaaaaaggaaaaaaagattgcttaaaagaagccccttaactctgaaggcagttccatccaccttacaaattcggtgccctgtgaatacacatccatgggtcacagcagggaatctttttaactagaaaaagagcaggagaaggaattcagatcaacatcacggactgcagcagtaaagctggtgcctgttcgcccctttcccctccaggcaggaaagaatcaaggaagaatttcagaatctttttatacaagaaagggattcggtgggggaagggagtgggtacagagatgaagaactttagggtttgctatttcaagcttaaaataaatcccaacgagaaaggatccgaaggcttggttttatttttaagatcttatccaaggcagggaactatatctggttttcaggggtgtgtggggtgcaaacggccgggccagcacagtcatttcatcccctgtcgattccccaaaagcaaaaccaaagctcagcatgtgcttctagaactttctatatctggtgttcaggggtgggtggggtgcaaacggccaggccagcacagtcatttcatcccccgtccgttccccaaaagcaaagccagagctcggcatgtgcttctagaattttacaatcttgaattacggcttcaaaataactcacattccactataaggaggctcagaggatgccaccgagtggacggacgtgagcaggaccacagagacaacccagtgggacacgcaacactgttcccaagatgttagcaggggaaagagtcggacgaaatggcgaagtgtttggcacaaagaagaccaacaaatgacacaccaagccagtaaagacacctccgtaagaaagacacattcctccccaaatctactttaggagctactgctgtcaactcttgactttctggaagtctaactagtacaaggtccaatcctcaatcgcttatgaaacaaaatcagaaaaaaccgggtagaaccctagtactccgcattataaaaagcacttccggccgggcacggtggctcacgcctgtaatcccagcactttgggaggccgaggctggcagatcttttgaggttagaagttcgaaaccagcctggccaacatggtgaaaccctgtctctacttaaaaaaaaaaaaaaaaaaaaaaaaaaaagctgggcgtggtagcgggcgcctgtaagcccagctacttgggaggctgaggcacgagaattgcttgaacccgggagacagaggttgcagtgagttgagatcacaccactgcactccaacctgagtgacagagtgagactccatctcgaaaaaaaaaaaaaagactgaacagcttctctttagaactttctaacacacccccaggtggaggccagtgttgcaacgatcgcacgagggaccagagggtaattctgcagcctgatctctctgttgagatgctcacgctctctttttgcagacatgatgtggttaaagccagggtctttctcaatcaatacattttaaaaatgcgagctgggggcgggggcgggggttgggggcgggagggtctgtcagctgtgtggagacaaacctcctgatccaggcgctctctggcagaggcgggcaagccccacttccatgtatggaagtgaatgaaagcagtaaaacctcaggcatgagtctgggcagggctgggggtgggggccggcattcctcccagcagggccagccccagaggggcgggcagcaggaaccttcacctggggtcccgtgggtatttccctgggagagccacaggggcagagaggacgggaggcaggaaagcaatgagctcggcacactcagtagacggagggcacccgggaaggggagctcagcctccccgagaatgcaccagagcctgagtcctggaaaccagggccacgcagctcccgcctgccctgacctcagtcccctggaatgcagaattctccacggtcagccatccatcaccaccgctccctcatggccagcgctgaaagaaggggcgtttccgtttttgtggggggcggtggtggttgtggtttttgtggtctgagaaactcatgacagttacccacctcctgccaggacaaggccacaggaggttgcagaaaattcaggtcacactgtgggggggctggggtcagagagaccaaggttggaacccggcaggtaccacggacggtcacactgtgggggggctggggtcagacagaccaaggttggaacccggcaggtaccacggacggtcacactgtgggggggctggggtcagacagaccaaggttggaacccggcaggtaccacggacggtcacactgtgggggggctggggtcagacagaccaaggttggaacccggcaggtaccacggacggtcacactgtgggggggctggggtcagacagaccaaggttggaacccggcaggtaccacggacggtcacactgtgggggggctggggtcagacagaccaaggttggaacccggcaggtaccacggacggtcacactgtgggggggctggagtcagagagaccaaggttggaacccggcaggtaccacggacggtcacactgtgggggggctggggtcagacagaccaaggttggaacccggcaggtaccacggacggtcacactgtgggggggctggagtcagacagaccaaggttggaacccggcaggtaccacggacggtcacactgtggggggggctggagtcagacagaccaaggttggaacccggcaggtaccacggacggtcacactgtgggggggctggagtcagacagaccaaggttggaacccggcaggtaccacggacgacaggttcctgctgcccatccctctgggaggaatgacggccagcagagccaggacccacttctccgtcctggaagacgcaatgagataatacatgaaaagcagtaacaaggtggtcctagaggggtcctaggctaccccgtgttaaagatgagagccatgaagaccacttcaaggtggtccctggaatccagtgaggggctcagtccacagaagccatgactgatgatcattatcatggaaccctccagctcagggaatgtctgagtagctccctgaagtccaaacggaagactatgacccttgggaggccgaggcgggcggatcacctgaggtcaggagtttgagaccagcctggccaacatggtgaaaccccatctctaccaaaaatagaaaaattagccaggcatggtggctcacgcctgtaatcccagctacttgggaggctgaggcaggagaatcgcttgaacccaggaggcggaggttgcagtgagctgagatcgcgccactgcactccagcctgggagacagagcgagactccgtctcaaaaaaagaaaagactatgacccccctcccaccacaagcaggacgaggcacctcggatgccccacaccccctgtccctgaggacgaactctaaggaacaggagaaacatttttataacttcctcgcgcccagcataaacctgttaggattctccagccaggcccaaccttataaacctatgtcaagttcaaactatactctcaacagttgtacttatcactccacagagaattcacactcccttctctaaggagtccagagtgagacagaggctcgtatctgtcatcccagaacttggattgcttgagcccaggagttcaagaccagcctgggcaacatagtgagacccccatctctaacaaaaatttaaaaattatctgggcgtggtgacacgcgcctgtagtcccagctactcaggaggctggggtgggaggattgcttgagcccagaggttgaggctgcagtgggccatgaccgtgccactgcaccccagcctgcgtgacgggtgcgggaggatgatggtgcatgcacgtggtcgtgtggctccgtgctgcggctcctctctgtctagcaaagtgcaactctcaactccaaggagacctatgctgggtttcacaaagtacttgaaagcacaccaagatgattcttgaataactggcattagacacgattctcactcctggccaggcgccgtggctcatgcctgtcatccaagcactttgggaggccgaggtgggcggatcacctgaggtcaggagttcgagaccagcctggccaacatggtgaacttccatctctactaaaaatacaaaaaaacttagccaggtgtggtggtgcacgtctgtagtcccagctactcaagaggctgaagcaggagaatcccttgaatcttgaaggtggaggttgcagtgagccgagatcgcaccattgcactccagccttggtgacagagcaagactccatctccaaaaaaaagaaacgcttcccgctcctaagttttgggatacctaaattctctctcgagtcaagtggcaggtctgacccggcagcctcccttccaaattctccaggctcagggcaagcacgtgtccggggctgtcctgcaccaactttttgtttttctcctactcaggcatattcgacctccctgctcaggttccagtgacttcctcagagcaacagggctgattcccacgaccccaggccccagggccgagtgccaggtgctcaggtcgcagctgtccctcaacaccactcgggaagggggctaactgcccggacgggccccaggatcacgagcctcctctccttccctgatggcccaacaggaaaaagtactgtggctgccaagccatctggatggaatggaatggctctctaccagttaggggccgcatcggcctagactcccagattgaagcacctgaccttctgtaaattcctttctttacattgcacatatttcagcgctggtattccccctcttaagagctctgagctgttgtccagtgaggtaacatgtttgttttttcagccctgggttacagccactcgaggctttccacataggaggtctgccccgcgtcccgggcctgaccccagcccttccacaggaaaacaactctgctgtcaggaatgagcccccgcgacggggagagtggtcttttctagaggctgggatatgtaaactcacacgggaaagatgggcctgtggtatttccctcttttccagcatgctcatctctttcttttttttttttttttttttcctgagacagagtctcgctctgtcacccaggctggagtgcagtgctatgttctcagctcactgcaacctccgcctcccgggttcaagcgattctcctgcctcagcctcccgagtagctgggattacaggcatgcgccaccacaccctgctaattttttattttttttagtagagatggggtttcaccatcttggccaggctggtctcgaactcctgacctcaggtgatccacccgcctcggcctcccgaagtgctgggattacaggcatgagacactgtgcctggcctcatctcttctctaagagcaaaacttggcaaagtctgacagacactggttggacttcttttaaaggctaccaggaaaactgccaagaaatatgactggcccagccagacgcggtggctcacgcctgtaatcccagcacctcgggaggccggacgcggtggctcacgcctgtaatcccagcacctcgggaggccgaggcgggcggatcacaaggtcaggagattgagaccatcctggctaacacggtgaaaccctgtctctactaaaaaaaaatacaaaaaaaattagccgggcgtggtggcgggcgcctgtagtcccagcaactcgggaggctgaggcaggagaatggcgtgaacccgggaggcggagcttgcagtgagccgagattgtgccactgcactccagcctgggcgacagagcgagactccatctcaaaaaaaaaaaagagagagagagagaaatatgactggcccagccatacagaggctgagaatctggaggctggtctgccatctgaccgcctcctccctgagcctcagtttccctgcctgtcaaagaagactgtggccacataatccccctgtcctttccagggtatcattcagtgactgcattgttcaatattttgaaataagggcatttaattatgatgacagcaccaataaacactgagactcacctttctgcttggaattccaaacctcttcccaccggaatcccgccaagccttcaactctccatccaaaccattcattctttctttcaataaacacggtgccaagtatttactaataagaggtgtcgaacgtgttaagtaagaaggacacaaggaggaaagacagtttctctgccctcaggaaaccatcgggtctcgtggaacagaacagtggtcaccgtcttctggccttttcctctgtgcccagcactatgttcagggctttttatttttatttatttattttgagacagagattctctcttgtcacccaggctggagtgcaacggcacaacctcagctcactgcaacctccacctcccgggttcccgccattctcctgcctcagcctcccaagtagctgggactacaggcgcccgccaccacgtccggctaattttttgtatttttagtagcaatggggtttcaccgtgttagccaggatggtctcgatctccagacctcaggtgatccgtccacctcagcctcccaaagtgctgggattacaggcgtgagccaccgcgcctggccaagagctttttatatcagtcatcgtcttaaacctccaccgcaacctgacaaggtggacgctgctatcgttcccactttacagatgaggaagtggggttaaagtaacttgcccaagatctcaaagctggagagcgggaaagatggatcagaaccaggtcatccaggagagaggctggcccctccgttctcagagctcctgcgggcaactccagcccttttagaaccaataccatggtcatcacccagaaaaaactctaaatttataggtatatatatttcatgccttatctccccagcttaattataaacgcctttgaaagctgggactgagtcatttatttctctgcatcctgacactgcctgaggccagtgagatgctcagaaaacatgtgaccagcaggggcctggcggagctgagacaaggcaacaacgtgcaaaggtgatttgtgtaatatgagcacatacgatgaaaacatctggcttgagagcgtcctcatccctgtcaccacccccctcccccaacactacgccgtgtggaaaacacctagaggaacttcctctacttcacacacagaagccaggaaccccccgggatcttctctgcactctaaggaagctgatagaaaatgcatttctgggccgggcgcaggggctcacttcggccatcccagcactttgggaggccaaagcgggtggatcatgaggtcaggagttcaagaccagcctggccaagatggcgaaacaccgtctctactaaaaatacaaaaattacctgagcgtggtggtgcacgcctgtagtcccagctactcgggaggctgaggcaggagaactgcttgaacacgggaggtgtaggttgcagtgagccaagatcaagccactgcactccagcctgggcgacagagcaagactccatctcaaaaaaaaaaaaaagcatttctgcaacccggcccagcagaaggttctttggtttgagtgtggcctccttggtcaaaagcacctgtctcctatcccgtcaaggaggtcaaacctccttggtacaaaaagcacctgtttcctgtcctgtggcatgtctggaacccagactctctttctcagtccaagcccagacccgagagaggcagctctcaccttgcaaacagacccccgcagtcagcttctcagtcttcacacagaaatcacacctccacgtcagcatcgcccagaatgtatgttcctggggctctgccaagggaacctctgttttcctcacagaacgtgaaaatgtttccacggagcacgggcagcccccatcactcatcaggttccaaacatgcatcctctcgctccatcctatacttaggcgcctcggcaggatcaaatgaaccctctccgtctcaactttccccttccttcccacacggctatttatatctggaatatctctctgtcttaatccactggactaccctccccctcgtttgaaaaggtcacttgcacattcttctttccagaaggcttttcttgcaggaggtggctgccagcttgtcccttccccggtgcctctgcccaacaagacatgacggtgagcaaggttactcatcttccgaaaatgctaacgtgctgactggggctaaccctacgctaaagcaaagccttcaaaaactggaagcagcagggcgcggtggctcgcacctgtcatcccagtgcctgggaaggctgaaacaggaggatcgcttgaggccaggcgttcaaaaccagcccgggcaacatagcaggactccaactctacaaaaattaatcttaaaaattagctcactcctatcatcccagcactttgggaggccgaagcgggtggatcacgaggtcaggagttcgagaccagcctggccaacatggtgaaaccccatctgtactaaaaatacaaaaattagccaggcgtggtggcgtgcgcctgtagtcccagctactcaggaggctgaggcaggagaatcaccgaggcggaggtagaagtgagcccagattgtgccactgaactccagcacaggcgacagagcgagactccctctcaaaaaataaaataaaataaaaattagctggggaggtggtgagctcctgtagtctcagcttctcagggggctgaggtgggaggatcgcttgagcccaggaggtcagggctgcagtgagtcatgatcacactactgtgctccagcctgggtgacagcctgagacttgtctttaaaaaagaaacacacacacacacatacacacacacacacacgatacgagttctttcatcttgcaagaaagaatcatgcggatgtgcgcggagccgagggaccatggtggccgcggtgtggtcactgatgaggttcctcatcacgggcggtgtggctggaggcgcgtcgacctgatgtatggccaggagctgctggggcccagcaacaagagccgagcgcccctacggaaggctggagaggtggttccccgccacgtaccagttcagccagtacgtgtgtcagcagacaggcctgcagataccccagctcccagcccctccaaagccttcctttcccctccatgactcctggaatgcaggtatcatcacagctctgtaggcccctcccaggcccgcgacactccaaggagggctgggagtacgtggagtcgcgcagaggctgcctgccccggccagagcgggagaacgggcagggcgccactggcctgaggactccagactgggaccccactcccagggaagctcccagcctcaccggcccaataaaggacttcagaagtgagaaaaaaaaaaaaggtgaaataggccaggcgcagtggctcacacctgtaatcccagcactttcggaggctgaggcgggcagattacttgaggtcaggagttcaagaccagcctggccaacatggtgaacccctttctactaaaatacaaaaattagttaggtgtggtggcaggcgcctgtgatcccagctactccagaggttgaggcaggagaatcatttaaacccgggaggtgaaggttgcagtgatcttagatcgcgccaccacactccagcctggggaacaagagcgagactctgtataaaaaaaaaaaaaacagggctgggtgtggtggctcatgcctgtaatcccagcactttgggaggctgaggcgggtggattacttgaggtcaggagttccagaccagccgggccaacacaatgaaaccctgtctctactaaaaatacaaaattagctgggcatggtggcaggtgcctgtaatcacagctactcgggacactgaggcaggagaatcgcttgaacccggggggcagaggttgcggtcagccgagattgcaccactgcactccagcctgggagacagagcgagactccatctttaaaaaaaaaatggaataatcaagtgattacatttggaacatgtgggaatcagaaacccaccacccacggaggccaccacctaacacaacagtaagcaatgggggtatttacttcaatcttcctttttatgtatctgtttaatacagtgccatctataatcatggtatcatgtataatttgggatctcgcttttctgaatgcagtatgtgaagtataggtctacagctctatattccagcaaaaacttttaaccgccaacccttttttttgtgacagggtctccttctgtcactcaggctggggtgcagtggcaggatcacggctcactgcagcctcaacctcccaggctcaagtgatcctcctgcctcagcctcctgaatagctgggactacaggtgtgcaccaacatgcagggccaattttttaagtttttggagagacaggatctccccatgttgtccaggctggacacaagtccctgggctcaagcgatgcttccacctcagcatcctgagtagctgaactacaggcacacaccaccatgcctggctaatcattttatttttagcagaaacaaggtcttgctatattgcccaggctggcctcaaactcctgggctcgagtgatcctctcaccttggcctcccaaagcactgggattacaggtgtgagccaccacgcctggccaattaactcgatttttttttttttttgagatggtgtctcgctctgccacccaggctggagtgcagtggcgcaatctcggctcactgcaagctccgcctcccaggttcaagtgattctcctgcctcagctcctgagtagctgggactacaggcacccgccaccacgcccggctaattttttctatttttagtagagacggggtttcaccgtgttcgccaggatagtctcgatctcctgacctcgtgatctgcctgcctcggcctcccaaagtgctgggattacagccgtgagccaccgtgcctggccaattaactcgatttttaatagctattcaggctgggcacagtggctcatgcctgtaatcccagcactttgggaggctgaggcaggcggatcacctgaggtcagaagttcctgaccagcctggccaacacgacaaaagcccttctctgctaaaaatacaaaaattagccgggtgtggtggcgcgtgcctgccacttgggaggctgaggcgggagaatcgcttgaacccgggaggcagaggttgcagtgagccgagatcatgccattgcactccagcctgggcgacagagtgagactccgtctcaagaaaaaaaaaaaagaaaaagaaatagctgttcaacaagacagtaagtattgtaatttacttaacccttccatgattgttaacattcagaggatttccagggtctcactaggatatacagctgtaaggaatctcttcaggagggcaaggtaaaatgaggtaagcatcttaacagttttgtcctaacctacaggatgtacatttcatctgcatttatgactaattcagatcatattctcacttctaaactgacattaattccccttcccttcttaaatcaagtcctcccttagggctcactgaatctttgaaaagtttgcctttcataatttctactatctatttatttaattaacattcccatagcaaccctttgacttttcttaagcaacttgcttacatgaacctgcaaccaaatgaattataaattttctcagtggcctcataaagaagaaaataaggaacattagctgggtgcagtggctcacacctgtaatcccaacactttgccaggtggaggcgggtggatcacctgaggtcaggagttcaagaccttcctgaccaacatggtgaaacctcgtttctaccaagaacacaaaaattagccaggcgtggtggcgcgtgcctgtaatcccagctactcaggaggctgaggcaggagaatcacttgaacccgggaggtggagctgcagtgagccgagatcgcgccactgcactccagcctgggcaacaaagtgagattctgtctcaagaaaagaagaaaagaaggaacattcaggaaaacgggggagagttgtgtgtaatagtaggtgagaagacttttgacatcatatttgtacacttttctcaaagcaatagatacattcctgagacactgcaggtgaattttcctaagcagaggcaatcacaggttgaacacctcttaggagctcacaatctgaaacaactaggcatattgcctaacaaaacgaaggtccttctgtgataaaaagaggattcccagccgggcacggtgactcacgcctgtaatcccaagactttgggaggtggaagcaggtggatcacttgagtccaggagttcgagaccagcctggacaacacggtaaaaccccgtctctaccaaaaatacaaaaattagccagtctcataaccccatctcaaaataaataaataaatattagattttaaaaatgtgaattgtccctgaatttatctatttcataactttggatttaaggtgaggtgggtttttaaaaatacagcaaccttcagtaagtaaaaaaatctatattaaatacaagttgcctaatactagtcccccacaaaagccacagcataatagaagtgcccggcacggagaaggcttttgtccccatatacatctgaatgcgcttggaagcggagactgatggcctcagagaatgagcctctcagcttatccaaacggcagagcccagcggcgggagtttcacagacaccatcttctcactgctttccatcagtcctagaggggcccctctctaaggacggggaagcggctttcaaaggcctcctttcgcctgttgtacacagggagcacatcagcctgagacatttcccatctaaggagagcggtggtttgagggattctgttccttgtctctaactgtgttgggttcattatcaaggcagaaatcatacaaggttatcagacaggcacacactgacacttttagcctctacccacctgagacagaaaaagcagcacctgtcaggttagccgaggatataaccaagacccatttaaaaggcttgatttaaaaaaaaaaaaaggtataggtactgggacggacacacacacacacacacacacacacccctttcattttatttgaaattttttttttaacatactgcccttccagaaaataacagttaatttaaaatgctatatccgggctaggcgcagtggctcacgtatgtaatcccagcacattgggaggccaaggcaggtggatcgcttgaggccaggagttcgagaccagcttgggcaaaatagtgaaaccctcctctacaaaaaataaaaacatcagtccggtgtggtgggacacacctgcagttcccactactcagggggctgaggtgggaggatcgcttgaaaccaggtggcggaggttgcagtgagccaagatcgcaccactgcactccaccctgggtgacagaacaagactctgtctcagggaaaaaaggacaaaaaggaaatttttttttttaaaatgctaaattgatttgcgcaaaaaaccatttaagcatatgtattttcatatgcagtatatgcctattctttttctggaaaaacataccagacactactaacagtgatgttatctttggaaagaggattattgttacagttaataaataaaatgctgggccgggcgcggtggctcacgcctgtcatcccagcactttgggaggccgaggagggcagatcacgaggtcaggagatcgagaccatcgtggctaacgtggtgaaaccccgtctctactaaaaatacaaaaaatcagccgggcgtggtggcgggcgcctgtaatcccagcactttgggaggctgaggcaggagaatggcgtgaacccgggaggcggagcttgcagtgagccgagatcgcgccactgcactccagcctgggcgacagagcaagactccgtctcaaaaacaaaaacaaaaaatgctggctctctcttgcagatggaaaacagtgaacacagagaaacatggcgtatgaagtcatgctgagcagaggaatataaatggctttctaatgtaaacagtcagcaggaaagccataatttgtgctgcatgtacagagacagataaatccctgtctcctcatgaacacacaccgtgttttgttgtaaggatctctatttgcctgaactgttggctcaggggcagaacagatccagaggatctcagaaaaaatgtcactaatttcttcacaagaaagaagggcttcaaaaagcgcttcagaactagagtgttccaccccagtctctgcaaattaatactttccgcaaatccaaatgaaagagaatatgttcacgtggtattaagtagcattttattcttaagaacatttgtaaaaagcttaaagcaacgcatccaagggttgaagccgggactttctgcaaatttaggaaactgatttccccccaggaaaatgtctgaaggcatttacttccaattcaccctcacgcctacatctgaaatgtcagaatccttaggtgccaaactgcaatgtatattacagatttgtgtgtaactttaggtggtcaaagacacttgtgtaagaaaagaaacctatttcaaagtaaggtaaaattcatgaaataaatggactgagtcaccctaaaatattaagaaaaacatctatcagcacaaggacagtgggctgctttgcagctagtgactgtctatggataattttgaaacaaaatgccacacttaattagccagcgggcttcgcatcctgtgtgtgacggagagaatggtattaagaaaaagactccctcaggctccattaatgccctaatgagaggaggcggggagaggggtgttgggtagagggcagggcagtcaggattaccacatggccctcaggaagtacaagctctgcgccttctggacaaatgggggactctcaaccgcacactgactattgggcgtatctagccagctatttccacagggtcctctgcaggaaacaattgtacccacactccacacatgcccagcagataaagcagttctcagattacatccaagagggagaacgtgggccttaagctcacttaaccgtcatccgtgatttcgtgaccagcaacccaccgacggagggagtctcgattttcaaaaagacaaaagtgggagattctccagatggcagagagctggactcgacatcaacccttcaacagaccttccggcttactttagttatcacacacacttaggaaaagaagggatctgttagaagcaagcatgcattcaccaaacacacgtcatttcagactatctttccttgaaaactatcaataggaactatctaagtgatagcaagctgtctgtgagggcctcctacaataaacatgctgatcacaccgaggagtgtgggctgaatcataatccaatcagggcaagtttggaatcggctggatttgaagacggctgagcaactgactaacagactcctcctagcctggagaaggtgtctagcggcataaccccccaactctatccccagactcaggctaatcaacatttttatcaactgcttgtataaacaacagtctagcagggaccacataacacagagctaagaaggggctttgatgactgtaggtgatcacatcagcctgtagtcccagctactcgggaggccgaggcaggagaatggtgtgacttcaacagacagggcacagtgactcacacctataatcccagcactttgggaggccgaggtggggaaaacatgaagtcaggagttcgagaccagcctgaccaacatggtggaaccctgtctctactaaaaatacaaacaattagctgggtgtggtggcgggcacctgtagtcccagctactcgagaggctgaggcaagagaatcacttgaacctgggaggcagaggttgcagtgagctgagatggcaccactgcactccagcttgggcaacaggagcaaaattctgtctcaaaaaaaaaaaaaagaaaagaaaagtgaatgcaatgagatctcgcgacatggtaacagaagtctacataacatctacaacaagcttgtccaacccacagcacgcggacacatgtggcccaggacagctttgaatggggcccaacacaaatttgtaaactttcttaaaacattatgagatttttttgctatttgctttttttttagctcatcagctatcactagtgttgtcagcatttttttttcttttgagatggagtttcgctcttgttacccaggccggagcgcagtggcacgaatttggctcaccgcaacctccgcttccagggttcaaatgattctcctgcctcagcctcccgagtagttgggattgcaggcatgcgccaccacgcccggctaattttgtatttttagtagagacggggtttctccatgttggtcaggctggtctcaaactcctgacctcaggggatccgtcgacttcagcctcccaaagtgctgggaatacagacatgagccaccacgcccggctggtgttcgcatattttatgtgtggcccaagacaattcttcttccaacgtggcccagggaggccaaaaaattgggcaacaaaggaggtagggcagccagctgccctctgtgcctggacagaccacactggagtctgcattcaggtggggggatgactgttgggggggtggggcagacaatcttggagggtgcttggatctgaatggcctgggtgggggggaagggtgaacccacatcacaggagaaatgctccaaggaccaggggactctccctggggagagagaagagttgtctgcagttcttcacggcccagcggtcccctgggagaggacggctgaggtcagaatggacttcctcaggagatggtgtgttggggtcactggaaacaccccacacagagacggtgaccgtaggggccactctccctcagtaatacaccctgatttttcttgacaagcccccccacagcccccaggcctgaggctcagtccacctggcttgggaccccagcctccagctacacaggtgtggacacaactcaggcttggccctttggtatttacacatcccggccacagtgaccagttatgggatcaagggcgaccatgccggactcctgctgctgggagtctgggaggacaggaagcaggctcagaactgccgatggtcctcaggccactaggagatgaggaacagcctgccagaggccagggcgcagagacaggcggggcggggagatgggcaaggacctgccccaggacggcatctgtgccacccgggcctaaagctgacctatatctggacctctcacccacaggaaactcagacccttctgaacccaggagttgatattctacacacctagataaggcagaaaacagggctcagaaaagttcaggaatgtggcaaggaggcagacccagggacaggaccaagttaaatggataagaacaacaaataaattgcaaggaaaagcagggaagggaaactataggttaaaagaggcttaagggatacagctaccaaatgtaatgggcaaattttatttggattcaaacaaaccaactgtcatcccagcactttgggaggccgaggcaggtggatcacgaggtcaggagatcaagaccatcctggctaatatggtgaaaccccatctctactaaaaataccaaaaaattagccaggcatggtggcgggcacctgtagtcccagctacttgggaggctgaggcaggagaatggtgtgaacccaggaggcggagcttgcagcaagctgagatcgcgccactgtactctagcccaggcgacagagcgagactccgtctcaaaaaaaaaaaaaaattaggagacaatcaggaaaatgtgaatactaactggatatttgctgaaactaaagaactgatggatttcttgggtgtgatattgtggttatgttttttaagggttacttagtgaaatgcttatgaaggaaatgagatgacggctgggactatcttcaagatcattgaggaggtgggggtgggggcagtaggtgtccttgagttgatgactgttgaatgtgggtggatatgtggggattcactgaactgctttctctacctgcatgatatttaaagtttcccaaaataaataatattaagagacatatgcacagaccagtatctccccctggcctctcccagctcaaaagagggtgcgggatccattcagtaaaaccgagcacctgattagtcaaagagatgatctagaattacacccatatgcaaagatacacagatgcagcccggcgtggtggtgcacacctgcattcccagctactcgggaggctgaggtgggaggactgcctgggcccaggtcaaagctgcagtgagccctgactgtgccactgcactctagcctgggcaacacagcaagagctctctcacacaaacaagcaaacaatcaaagacacagatgtcatcaaatcaacaactgacagacaattattgtcctagaaggaaaatgaagagaggccaggcatggtggctcacgcctgtaatcccagcactctgagaggctgaggcaggcggatcgcttgaggtcaggagttcaagaccagcctcgtcaagatagtgaaaccctgtctttattaaaaagacaaaatgagccaggcgtggtggcgggcacctgtaatcccagctactcaggaggctgaggcaggagtatcgcttgaacctaagaggcagaggtcacagtgagctgagatcgtaccactgcactccagcctgggagacagagagagacacggtctcaaaaaaaagaaagaaagaaagaaaaagaaaagaaaagaaagaaaagaagcaaaaaaatgaagagaaaccaggttctgtgatagtctctagatacaaataaataactaggtgctttggaatgggggaggggtacaaagaggtaaaaaggctgaattcctctctcttataatccaaataaccataaaatgtggaatgaataccgaagcgcctggtaaacatttaaacggcacgtgctatgcaccaggcaccatcctaagtacttgtcaaatattatgtcattcaatccttaacaaccaccctaagaggctggtaccatcatctccattttactcaccaggaaactagagacacagaaattccagaactggccccaaagtcacacccccgggaaacagccaagtttccaacccgggaaacctggatctggatttccagtctatattcttcgtctactatggaacacactttaaatattcacataccataatggagtatttttgaaagatcacgggtaaaaacaatttttacaattgcagtcaagaacatgcccagagctggaaaacgctgcactcacagctacattcacgcctattcggggctccggcggtcacactgcgatttttccctattgcacgtggtcccgcccaatcttcagatttcacatcaaaacctgaaaaatgagtaacagatgaggcagctgtgctgtgagccaccacgatcaaaagaaaaccgtcttgacctgatcacgtttaacgggaggaaaagcagcgccttctgattttaaacagattaaatccatccagatttttatcccaggcatattgaccaaaaaaagacaaattaaaaaaaaatgtggaactgatgcatctggatgaaattctcccaggaaaacaaagagaaagccctatccctaggacagcagaactcaccacaccctgtttggtgactgttcgacaacgatatgagataaaaccgtcattcactgtagaaacagcacttgaatttacctgtaattggtgcctgtactgagacaccctggggagcagggggagaggctgacggattggacagaaggaagcgacgaagtgaagcttacgttgtttttttaaaaggactttctgatgtagttcatacaaaaatacactgtgtatctggtccaagagttatgaccggcaagccgcagaaaatttacgtttgcttttaatcacggaggccacagaacaaaactttccatgacgggtctcactcccgagtaacggcactgggcttctgcctcgtcgtggtgcagaaagcacaggtttgagatttcactggaagttggaacggcagtttctgcaaacctcataaaagggaggactgatttagtcctaggatctcggcaggacacctgaagttcaattttgtctctgaacaaaaagcactacagcagcctgcaggctttccgtaggatgaagggggagttggggggcccttcactggaggaactaaaaaaaagccaaatcattaaaaaggcccttagaaaaaaaaacaccaccatggaaaaaggcagcaagagagaagaggttctcgctctcctgccttccaagcaaccagcgaatgtttcaagccgttcaactacctctgtcttatctcagagcggtccctgcacacctagaggaagaaagccacctgaagaggcttgctgctcctcctcctccatgcggaacgtttgatgtgagtattttttaaggtacaattccgtgaacagaaaggaccaagttgaatttaagggagttcagccaagctctttcatccaacactgtgaccctgatctaataatcggtgctctttgcttcaattctccagctctaacatacttggaaaagttaaaacggtgaatatctactgattactagttgctggaagacgtaatatgtacgcattttgagttctttggaagaaagatgctagagaaatgcaaacaatgaaatattaaagcatggcatgacaggtctgcagatatgagactcttttttttttttttttttgacacggagtttcactcttattccccaggctggagtacagtggtgcgatctcggctcaatgcaacctccgcctccagggttcaagtgattctcctgcctcagcctcctcagtagctcggattacaggcatgcaccaccacacccggctaattttgtattttaagtagagacagggtttctccacattggtcaggttggtctagaactcccaacctcaggtgatccgcccacctcggcttcccacagtgctgggattacaggcgtgagccaccgcgcgtggccgagtctcttttaatagactcagatatttgacatttcaaaaatggagagtcaagctttttcctatttttgagcacagaatcacacggcaatccagttgcacaagaagctgctgggactcacccagctgtgacatccatttgctcatttagtcctctttaaaacactcattgagaaacaaaaacagaccgagcgcggtggctcacgcctgtcatcccagcactttgggaggccgaggcaggtggatcatgaggtcaggagttcaagaccatcctggctaacacggtgaaaccccgtctctactaaaaacacaaaaaattagccgggcgtgagggcgggcacctgtggtcccagctcctcgggaggctgcggcaggagaatggcgtgaaccgggaaggcggagctggcagtcagccgagatcgcgccactgcactccagcctgggtgacagagcgagactccatctcaaaaaaaaaaaagaaagtcaggattcacaaagattccaaattcatagcgattttccttgattgtcttggaatacgcataaacggtaaattcaatgcaacacagaaaactaagcaccttggtggttcacaccatgcaccactgggaattcagatcatgaagaaagaaaacacatcctggccgggcgccgcagctcacgctgtgatcccagcactttggaagccgaggcgggtggatcacctgaggtcaggagttcaagaccagcctggccaacatggtgaaaccctgtctctattaaaaatataaaaattggccagtcacggtggctcacacccgtaagcccagcactttgggaggccaaggcaggcggaccacctaaggttgggagttggagaccagccagaccaacatggtgaaaccccatctctactaaaaatacaaaattagccgggcgtggtggcacatgcgcctataatcccagctactcgggaggctgaagcagaagaattgcttgaacccagaaggcagaggtcacggtgagctgagatggtgtcattgcactccagcctgggcaacaagaacaaaactccatctcaaaaaaaatttaaaaaatacaaaacttagccaggcgtggtggctggcgcctgtaatcccagctactcgggaggctgaggcaggagaatcgcttgaacccaggaggcggaggttgcagtgagccgagatcgcgccactgctctccagcctggcagagcgagactccatctgaaaaaaaagaaaaagaaaaaaaggaaagaaaacacatcctatgccaagcctgtgctctcctggccaaaatgaaatcatgcaggaaggatcccacctagttcacaacgggacgagctggagccctggaaccctgatcactgtcaggaaaaaggaagatccccaaggggtttgttcaaccccgaccccagctgtgcacaaagcctgttttctcaaatgtgtgtgcacattacaacaccttcccaacaaaaggtaggaatattttaaaacgtagaatcagggccgggtgcggtggctcacgcctgtaatcccagcactttgggaggctgacgcgggtggatcacgaggtcaggagatcgagaccatcatggctaacacggtgaaaccccgtctctactaataatacaaaaaattagccaggggtggtgacgggcccctgtagtcccagctactcgggaggctgaggcaggagaatggcaggaacccgggaggcggagattgcggtgagcccagatcgctccactgcactccagcctgggcgacagagcgagactgcgtctcaaaaaaaaaaaaaaaaaggtagaatcaaatcagtgaccctaacttccagggcttgcctctgtgctctagctcacattccaacccgtgtcagaagacaaatcgatcagcaagagctgtggacggctactcagaggcaggcctgagctgctaactgggagatgagtaccaaaccagcaatgcctacatgtctgagcaaacccatcccgcagcattccagagctgggacgggaggcaggtccacgctagaggtggcgtttctacagctccagagatgagcaccctccatttcccacgcgaaacagcagtctttcaacctctacaccgcccagagttaagcaaacagggtcagcggaagacacacctaatagctttgggaaaccacaaaatgattgctttgtgcgtaatttctctcaagaagagtgcctgatcatctttaagttacaagggtgactgaaagggtaacttaatagtaacttaaatctttcccaggcttcgtcgatcagcagcagtctggagcgtcattggcagatagaaatacagagctcagtaagtatcagtaatatcccgggactttaaggcactgtatttgttgtttcattcttctaggtctttcttcgcagttataatctcttatggggcaattttttttatttaattttttttttccaagacggagtcttgctctgtcacccaggctggagtgccgtggcccgatctcagctcactgccaactccacctctcgggttcaagcgattctcctgcctcagcctcccgagtagctgggagtacaggtgtgtaccaccacacctggttaattttgtatttttagtagagatggggtttcaccatgttggccaggctggtcttgaactcctgacctcaagtgacccacccacctcggcctcccaaagtgctgggatgacaggcgtgagccacagtgcccggccattgtagggcaatttttttgacaccttcatcaaatccccttgtatgcttgtaaaagtcattggtttgaaaagtttaaaaatatacctcatgccgggcgcggtggctcatgcctgtaatcccagcactttgggaggctgagctgggcggatcacgaggtcgggagatcgagaccatcctggctaacacagtgaaaccccgtctctactaaaaatacaaaaaaaattagccaggcgtggtggtgggcgcctgtagtcccagctactcaggaggctgaggcaggagcatggcgtgaacccgggaggcggagcttgcagtgagccgagatcgcaccactgcactccagcctgggtgacagagcgagactccatctcaaaaaagtatatagatatatatatatagatatatggatatacctcataaccgttttacagttcagtaatgtgatagattcccaaggctcaagctatgaaatgaatgactaaacttaatgatcatttatctaaacacaataatagcatttattgagcactcaccacatgccaggcacgtgtatattatctcgcgtagcctttacacaataaggcaggtgctgttatcacaaatggaaaaggaacgtgtggtacagagatgtacagcgccttgcacaaggacacacagctaataaacggcagagcgggggcgtgaactcaagcagaaggacaaaagactctatatttttagccatgtattagactgccttattatgcagagaaaaaacaaagagattaaaaaatatattacaaatgatggaacaagaaaaagcctctcaaggaacattgctcttattactttatttttatttatttatttatttatttatttatttaatacagggtcttgctgtgttgtcctggctggagtgtagtgacacaaacatggctcactgcagcctccacctcctgggtttaagcaatcctcctgcctcagcctcccgagtagctgggaccacaggtacccaccactgtgaccagctaattgttattttttgcaaagacaatgtttcaccatgttgcccaggctggtctcaaactcctaggctcaagtgatccccccaccttggcctcccaaagtgctgaattacaggtgtgagccatcacacccggcctgctcctaactggactgttgtcctttattactaaaagactggcccaagtcctagaaacacagtcaccagtgggagcctgtcctggctggtccgggcttcttatgaagaaggcagaaaatcctaattttcaaatctgcacctttttgccatcttttcccaccttgaaagtgaatgcaaagaaaagatacagtggtgtcacagcaactgttctcttcctggctgcagtgtttggattcaaggaagagtggcagagctggagttgtaagaatgttgaggttgctaccaaatcctgtcccacccatagggccaaagggattcaagtaaattctcagccaagcttctcattgagtctgaactgaaagaaccacccagagcagccagagtgagactccacttcccctggctggagcaggctgaccagggatactggaccagggtcccctgactctgcagactttctcttcccctttgtcatgcaggaagtcctggggccacaccagagcctcacaaaactgtccagaggaagccagtggtctgcacccttggatgtcagtgcacccacactgaccatatgtttttgatcaggcatccagcccagacaaagttgagctctgcgactttaacaccaaaagagtgctcacttctatgaggctgaagtggatcccggagacggacctctccagtcttgacgagtgagtaacatactaatccaaagggaagaccaaatccccaaagtccaaatttcaccacctcctgactatcgatcacattccttctctctagaaatgtgaaaatcatctaccaacctacttattaaaacaagtctaactgccttaacttcaggattatagatttgctgatgaaattgttataaatgctctcaaagttctattaccatctaattacaatttatgcacagctatataataatgtgtgttttggaagctgaaataatatgtgttttggaagccaaaaaaattaagcttcaattacttttgtacctaccatgacaacaggcagaaacaggacaattttgtataaagaatgtttttttacatttttgtcctttttttttttggtgttttctcacagttcctgtcaaggtgagaggaaccaggcaaaatgcaggcttaacatatacggtcatccccaggttttttttaactatataaaggagaaattaataaaagaaaaaaagaaataccacacagcattttctttccccaccataatttttcaattttctttagagaaatgccagccaataactaattagaaccataccctttgttatcccaatgggaagaagtatacgcatgggcttaaagaacaaatgttaatgagaatttaaaaaaaattagcaatctggaactctggtttcccttcagtgtaaaacaaaattcccttctctagagttatttttatcattggcgaaatgacacggatagagtccatccacaagacgtgttcacccatccagtgccctcagctgggagaactccggctcttcacttgttctgatggggaaattagcatcattagctcacgggcttctaagcaccctaacttcaaatgagacaaaaactcagttacagaaaaggcatttgttccacatctctttggtttcaagggggaaaataattcctttttttttttttttgagacagagtttcgctcttgttgcccagactggggtgcaatggtgcgatctcggctcaccgcaacctccgcctcccaggttcaagcgattctcctgcctcagcctccctagtagctgggactagaggcatgcgccaccaggtctggctaattttgtatttttagtagagacggggtttctccatgttggtcaggctggtctggaactcccgacctcaggtgatccgcccacctcagccttccaaagtgctgggataacaggcatgagccaccgcacccggcaataattccttttaaaatcagcacgtagcttttgtaatttccaagagtatgtgttccataagaaggacagctggagtctttttacctggtatatatccccgagaaagatcttgagtggtttgttcacgaccaaggaaagaaactacctccttgaaaactggactggttttagagaataaagtataggatgtgagtcagaaaaactctgggccaaaaaataaaatgtttaagatgctaacgcaccagggtttgggcacgtccagcactctcaacggtattttcaaatgagagtctgccctgtgtcatccaggttctcatcatggaggaatcagcaggtccaggctagggccgcagaatactttttgtcatgcaaagagcctgtccagggtatagagagccagccatggcccatgtcctatcaaatattctcctttttcggaaaaagctctaagcatttgcaaaacatctgtttgctccatatttttactatccaaaaaatgtatttcctcttcagtaaaaaacacaacaataggctgttaagcctgtaacattttaccataattctatgttttcaaaagctagaaatcatttgtattgccggataaggacattattttaagtagactttagtctacaacagaaacttgccgtaacaatgaaaatgttttttggcaaatccctttctgaacattatttctccacgaacgtatcacaaaaaccaccaccaaggaaaacaaaggattctcgtattttgaatcaaaaagtactggccatgcatattcatactatatcaagcatgtcaatcaaaatgggcaaaataacctaaaaagcagtaaaaatgccaactcttgcctctgagtggttagtgaacctatgttttcccaatatgaaatttacaaactgcatcggatcaactgtatttcatactttaaatctcgaatctctacctcccactgcttcgggatggatgatttactcaagacatttggggtcacagtgtaagccttttgctcccagtaaatctaaatcatgcttctcaacaagattctgcacatataaaaggaacacgtggcacgcctcgccatgctccccagaggaaactaaacgcccccagaatagcccttctgtccactccagaaacaggctttcctcaaaaagggaaaggggctggattcacacgttgcatcatatacactcacgaagcaacagcgctccaaaactttttctgactccattcattacaaaatgtcctggatgtgctttattatcacagagacagacatcctcacccaagggacacactcagaaacccaaactcaactcggcagcaaactgggagacacgagaagttgacagcaaagtatccatttccccaaatcctccttcttccagtcaatgtgcatcgatggggtcagctcagcccttaactcgaagaccccgggaccacaggggccaccacgcagctgagctctgcacagcccgggctgttcccgcgcccgggaggcgtctggggaggaggctggacggccagacaatgcaaagctccccggtggccgcgaactcagcctggggcgggggaggcgggggcgggagacggagccgtgagcgcccttctcggccacagccacggccacggtcaccggccgcctctcctgacctcggcctcggcccccaggtccccggtccccggggaaggggctccgggaaggcaggtttctcccggaaagaaaggaaacgcgctggtttgggcgccacgggcggggggcgtgcgccctcccctcccctcccctccccactgtgggaatccgcgggggtcggcggcggaggcaggaagggcctggcgcctctgctcgcgggtgaaggggtcgcggaaccgggatccccgagcgcagccgcccccacccgaggctcccagcgtgtgcggacggaggggctcgagccgggatcccgggggccgaggggggtccaactttccagggcgggcgcagcgcagcactcgaaccaaagaggggtcctgggatgagggtgcgggcacagcgcggaaggggggggggcagaggcggggacggcggggtggggggcggggagaggacagtgggtcggggggcgggggactgggggcaggggtcggggggtggagggcgggcagggggacaacggggttggcggagggcaggggtaacgggcgtggggggcgggcaggggtaacgggcgtggggggcgggcaggggccggcgaggcccgcgccgctcaccttcctgtgcttctccttgtagggcagcgccagccacggcatgtcccgcacgaagtcctgccactgccgctggtcctggtccgaggacacgaagacgatctccaggcgccgccgcggctcgggctccgccgccgccccggcccccgctcccggccccggcccggccgccgcgtccccccgcaggcgcccgtagaaggcggccaggctggcgctgagctgcgcgcagggggcgctgaggctgcagccgaagtagagacccagcagcgagatgccgcgggcgcccagcgagtgcacgtccacctcctcgccgccgcccgtcaccagcttctcgccgagcagctcctccaggaagcccgacatcctggcccaccgcagggcgggcaggcggctgcgaccccgctccacggtccgcgcggcgggaggaggcggcggcgtcggcggcaggcgctggggagagcagagcccggcccagtagggccgcccacgccacgccccctccgcctgcccgcgccacgccccttcccccgccctgccacgccccctccgcggcccgcgccacgccccttcggctgccctcgccacgcccctccgcccgccctcgccacgccccctccgccctcgccacgccccgtttgcggccggcggtggccagagctctccgcccaggcggggtccgcagctgccggccgcggtgcgcggggtgactgcttgggcgagaagccggacccgaaacgccgcactctccctggaaagcccacggccgaagtgaagaaaggagaagggcccgctgagccggcgctttcccgggctgcagcccggcccgcattttctctcctccccagttctaaattccctccagacctccagggatcccgccccctccccgcggagctcttcaccctcttcctgttcctccccggcctttccctcctcctctccctgcacgaagcctgacccttaggccgctccgggccccactgaccctgagatgcttataggacccgccgtcctcactgcatcaggccgggcctggctggacactgactcctctgtgtgttccaagctgttctaagggggccgaggacgccctcgcagcttctggtggggtctggttagggtgccaggtctcagtgtgggatttccgtccaggggtcgccggggcctctccccccagcgaatctgtcttccagccccacaaatggatgcaaaggacgccgcggggcctccagaccaatgctggccgcgctcctgaatccgctccatcctcatgtcaagtctatggatagttgagaacatttctagagattttttttttcctaccagctggcaggatgctccccaatgcttagggagaagctggattaaacaggtggtctgggccgggcgcggtggctcacgcctgaattcccagcactttgggaggccgaggtgggtggatcacaaggtcaggagttcgagaccagcctggccaatatggtgacaccccccccccgcctctactaaaaatacaaaaattagcggggtgtagtggcaggcacctgtaatccgagcaactcaggaggctgaggtaggagaatggcgtgaagccgggagacggaggctgcagtgagccgagatcgctccattgcactccagcctgggcaacagagcaagactccgtctcaaaaaaaacaaaaaaacaggtggtccgtggcgagtactctggccacgcagcgcctccccccaacccaacccactggtgcacgaagcaggtgcagatccgggcccagccacagtaacaggccgccggtgtggatcagctactgacgactcagcgaaagcaaaaaaataaaagctgaaaacccgcccctctcagagcttccaccgccgcttcggaggatatttcctgtgcatccatcgccacctaatggaaagagtgaaaaatgaggccgaccaaactccatttgtgaaaagacactgccgggacaccaggcacaatgcttttattttacagcagctttccacatacacaaatgataggacgctttgcgggagctaatttaaacctcagaatagaacttcaagcttttggcacaaaacgtaagtgttcacatcgaaggttctccgtttttctagggtagaataaggaatggtgcagggttccagcttggtgaaatgttaccatataaaacaattgggagaggtggagatgggagcggaaagtggactggcgtctctacaagttatatccacttccttagtcacctgctggtattgctaatgacacaggtaagatcttagatggaggaccgccttcgaacaccctagaatcctactgcaaagtcgaattccaccttaattctcaggagactttcatgctgaaagtctgtgccactgtagggacaatattataaaacacacacagaaagcatcactttttagtgaaaactttatttatttatttatttatttatttatttattttgagacagtgtgggcggcaggccacccaggcgctgaggcaagagaccgaggacacaagccgttccagtgtaataaaatataaaataagaatagttataccagatatagatcttagataggcttatatatgaatatcattaatcattagtttgtagcaattactctttattcccatattataatgatcctcgctctataatcataatctagggaaaaccaggccatacagagataggagctgaggggacatagtgaggagtgaccagaagacaagagtgcgagccttctgttatgcccagacagggctaccagagggctccttggtctagcggtaacaccagcgtctgggaagacacccgtggccaggcggactgtggtgtagcggtagcgtaagtgtcaaggaaaaacacccgctacttagcagaccgggaaagggagtctccctttccccggggggagtttagagaagactctactcctccacctcttgtggagggcctgactgcaggttcgcccacaattatccggaggcctaactgtctccctgtgatgctgtgcttcagtggtcacgctcctagtccgccttcatgttccattctgtacacctggctctgccttctagatagcagtagcaaattagtgaaagtactaaaagtctctaataatggtggaagctgtttctctctttgtctcctctctctctctgcctcggctgccaggcagggaagggccccctgtccagtggacacgtgacccacatgaccttacctatcattggagatggctcactctccttatcctgcccctttgtcttgtatccaataaatatcagtgcagcctggcatttgggaccactaccggtctccgcgacttggtggtagtggttccccaggcccagctgccttttatctctttgtcttgtgtctttatttctacactctctcgtctccgcacacggggagagacccactgaccctgtggggctggtccctacagacagagtctcactctgttgcccaggctggagtgcagtggtgcgatctcagctcctgcaacctctgcctaccagattcaagtgattctcctgcctcagcctctcgagtagctgggattacaggcatgcaccacctcccaaatagctgggattactggcatgcactaatttttttgttttgttttgtttgtttgttttttgcaacagagtcttgctctgttgcccaagctggagtgcagtggcgcgatctcggctcactgcaagctccgcccctccaggtttaagcaattctctgcctcagcctctggagtagctgggattacaggcgtccgccaccaagcctggccaattttttgtatctttaatagagacggggttttcaccatactggccaggctggtctcaaactcctggcctcaagtgatccacccgcctcagcctcccaaagttctgggattacaggcatgagccaccacccggccttggtgaaaacatttaaagctactcatatcatatatattaagttactaggccaggtgaggtggctcacacctgtaatcccaatactttgggaggccgaggcgggcagatcatgagatcaggagattgagaccatcctggctaacacagtgaaaccccgtctctactaaaaatacaaaaaattagccgggcgaggtggcgggcacctgtagtcccagctactcgggaggctgaggcaggagaatggcatgaacccgggaggcggagtttgcagtgagccgagatcgcaccactgcactccagcctgggcgacagggagagactccatctcaaaaaaaaaaaaaaagtatatatatacacacacacacacacacacacacacacacacatagttactagacatcttttgaaatcctgtaaatgggttacaatgttttatcatctcatccaaatcttatctgaaaggcccatgcactgggtacgtgggttaggcactactgaaagagtgttagagtcctacactctgacactttcaaaattatgaaaactacagaaatgtaaaagggctatcagcatttacctgctacggcagccaaagggcaagaggcatttggtgtggaggccggtgaagagggaatttggggggctgcaaatattgcaaatattcgagtattaactttggtatacttggtgcaagtctgatataaagaggaggtttcttccatgtgtgacttgtcttatttaacaggaaagcactttccactggagtgtgtccaaaccagcatctggcacctggggaagggagagttcgaacacactgcacatgaaatataaataaaatttagagaattgtggatgcggcaggccttggttagaggccaaatatcacagctgccttttaaaggggtgtggaaagaggggatttgcaatggaaatgatcccagaatcataattgtagtgggtgttataagaagcccaaggagtcatttggcatcctgtgaagaattagccagtgtgctctgggctacagaaatcttgctctctgtgtatgtggttctctaaaggagaatgtccccactggtgttcagctagcgatgttacatgaatcgacttggctattctgaaaattattattgttttaaaatatgtaggaatgagcctcaacatgtatcgcattctgtagaacatattagaattttctcttcagaaattgcttttgaaggcacatgaagtcatacgaaatacacacagcacaaatatatatttgtcacttttaagattcataaatcacagtccttggactttagaaagagtagcacacatgatgtgggccgggcgcggtggttcatgcctggaatcccagcactgtgggaggccaaggtgggcggatcacctgaggtcacgagttcaagactagcctgagcaacatggcaaaatcccatctctactaaaaattaaaaaattagctgggtgtggtggcgcacacccatggtcccagctactcaggaggctgaggtgggaggatcgattgagcccaggaggtcgaggctgcagtaagccatgactgtgccactgcactccagcctgggtgacagagcaagactttttcttaaaaaaaaaaaaaaaaagcattcgtgactcatgggagaagatcaaaatatcaacgttaacaggagtttggaagaagttgattccaaccatcacacgtgtcttccgtgaaggaagaaagtgcggatgcggtagaaacaatgagaactagaatgagaggtgaagcctgaagatggggctgagatggctgcagtctcatgaccaaactgtagcaggtgaggagttgcttcttgtagatgagcaaagacagttagaacgtcaacttaataaggcagcggtaaggtttgagaggactgactccaattttgaaagaagttctactgtgggtaaaatgctatcaaacagcatcgcacgctacagagaaatctttcttgagagggagagatgatggatacggcaagcttcgctgcagtctgattttaagcgcttttaccacagccacccaaccttcagcaaccaccatcctgatcagtcaccagcagccatcaatattgaggcaagaccctccaccagcaaaatgatttcaacttgctaaaggctcaaatgatcattagcatctttttttttttttttttttttgaggcgcagtctcgctctgtcacccaggctggagtgtggtggtgccatctccactcactgcaagctccgcctccctggtgcatgccattctcttgcctcggcctcccaagtagctgggattacaggcacctgacaggacgaccggctaatttttgtatttttagtatagacagggtttcaccatattagccaggatggtctcgatctcctgacctcgtgatccacccgccccggcctcccacagtgctgggattacaggtgtgagccaccacgcccagctgttttgtttttgtttttgttttttgagatgaagcttcattcgttgtccaggctggagtgcaatagcgtgattttggctcactgcaacctctgccttcctggttcaagccattctcctgcctcagcctcatgagtagctgggattataggtgcgtatcaccacgcccagctattttgtttgtatttttagtagagacagtgtttcaccatgttggccaggctggtctcaaactcctgacctcaggtgatccattcacctcagcctcccaaagtgctgggattacaggtgtgagccactgcgcctggcctgtgatattagttttattgttgtaatctggaaccagagctgcaatatcttgaggtttgccagtatataaacacagagaaacgtattcctaacaaaacaagtaggaaatatccatgatcattccagcccgtgtttctgtaactggccatgggttgtggctggtatttataatgacctttcactatccattatgtattccctttgctttcagtaagcacctcagctggttgtgggtcttttcctggtgggtgacccaaactttcattcctgaaaggtctgggcccttggtagtcctgcctggattgaattcttgtggtttttccattgccctaaatcataggccatggtctactaggacaccctgaggggcctctattccagacatactcttgctcacctcaattgtggacttgtggtccaatctaggatcaatcaccccagccagcacagtaactctcttatctgcctgttgattcagaggcagtgggaggccaaacaggcccagcagaagtcctcacttggagttcaatggcaccactgttgggtcttctgggggaaacattcctccatttggaaatacgacccctaggccagcagagcataaggtcacgtgaacaggaaacaaacatcttgctgctgggtcactaggagtgctagggactggtgcccctctcattgccaccccttgattcccggacccatgaatcctggctgtgggagaaacagcaccctacactcagttctgattcagagcatatactgcctcctgcagaactctggcccagccctgcaaggcatcgccacccagctggtgctgtagtggagtcttcaaaaggccattccaccatcttatcaaaccagctgcttcaagatggtgggcaacatggtcgtaccggggaattccatgagcatgggctcgttaccatactttctttgctgtgaagggagttcctcagacagaagcagtgcggtgtggcataccgtgacagtaggtacggcattctgtgagtccacggatgctagttttggcaggagcgtgacgtacagggaaggcaaatcccgatctagagtaagtgtctattccagtgaggacaaaatgctgccccttccgtgatggaagtgatccagtgtcaccaacctgtcaccgggtcactggctgatcaccccagggaatggggtcaccaactgatcaccccagggaatgggatcaccgggtcgctggctgatcaccccagagaatggggtcactggctgatcaccccagggattggggtcaccggctgatcaccccagggaatggggtcaccgggtcgctggctgatcaccccagggaatggggtcaccaactgatcaccccagggaatggggtcaccaggtcgctggctgatcaccccagagaatggggtcactggctgatcaccccagggattggggtcaccggctgatcaccccggggaatggggtcactgggtcgctggctgatcaccccagggaatggggtcaccgactgatcaccccagggaatggggtcaccgggttgctggctgatcaccgcagggaatggggtcactgggtcgctggctgatcaccccagggaatggcatcatttcaggggctcagggttggtctctgttgctggcagatggggctttcagccatggctgcagccaggatggccatagtgagtaacagtctgtgctgtgagcccatgaataacctttatccctgccccccatggccactttgttcatgagcccactgggcactaactgtggtgtcgggggagagaggctgagcagcacccagagaacgggccatcctatcgcttgaagattcgaactcttccctggtgaggccaccctttggcgagcatttacatgggacacacgtatcgtccggtttttgcccacatacctcttctctcagttccctcggtttccttgtcactaattttccaatcatgttccttccaagtccctgactctccaggcaaatcattggctacggtcggtgaatcggtgtgtgctctcacgtccagccatttctccttccaagcacaaccaacaaccaggtgcactgcgccaacgtctgcccaccgggaggatctgcccccaccgctgtccttcgggaatgtccaaggaagaggctggagggcaacagctgctcagtttcgggcggagactgcacgtcgtacagaaccatctgcaaactgggatgtgagtcttcgctttctctgtcagctgatcatggaggactccccatgatgctagaggtgcaggctgggaaagggaaggcagggtggagtcgtggcagtgggaaccaagggcctttgaagctgcttctccatctaacttcctggtgccttcagggcctgcttgggcccagtcacgtgtatactatttccattagatggtgaagcacggtgctgctgtgcacacccaactgtatggcttgatgggtcagagaacctccagttcacgacgggcagctcaggccacatggtaactccgtggcccatggctaagcatcagtctccaagaaggcccagtagcagtccaaaagctgtgtctcaaaaggagagtactgtccacaggatggcagagctttgctccaaaatcctacaggcttgctctgcgattcacctacggggcctgccaaaggctgcaaacagcatccttgtctgccacggtctcttcaagcatcactggatcagctggatcacgtggcccacgtggagagcagcttgcatcacagtcggaacctgctacagtgcgttctctcgctctggtccctctcaaagctagcagattttcaggttgctctataactaggtcaggctaacacgcccaaatgaggattgagttgccgttaaatatctggacactaaacggcccagtcaagttggcacacacaattgcccatcacacactctgacatggggtatctttaagacgtagcacaagagaaaggagggtgcagaagaggtaggaaatactaacctacaacttgtctttttttttttttttaaagaaacagggtcttggccaggtgcagtggctcacgcctataatcccagcactttgggaggccgaggtgggtggatcacgaggtcaagagattgagaccatcctggccaacatggtgaaaccccgtctctactgaaaatacaaaaactagctgggtgtggtggtggatgcctgtaatcccagctactcaggaggctgaggcaggagaatcgcttgaacccgggaggcggatgttgcagtgagccgagatcacaccactgcactccagcctggtgacacagtgagactccatctcaaaaaaaaaaaaaaaaggaaaaaaaaaagaaatggggtcttgctctgtcacccaggctgggtatagtgctgtgatcatggctcactgcagcctccaactcctgggctcaagtgatcctcccacctcagcctcccgcatagctggaattacaggtgcactccaccatgcccggctaatttattttctttctttctttctttttttttttttagagatagaggtctcactatgctgcccaggctggtcttgaactcttgacttcaagggatcctccggcttggccttctgaactgcagggattataggcatgagccactgcacccggccccatttgtaattcttttttttttttttttttttttgagacagagtctcgctctgtcgcccaggctggagtgcaatggcacaatctcggctcactgcaagctccgcctcccggtttcacgccattctcctgcctcagcctccagagtagctgggactacagacgcccgccaccaccagctaatttttgcatttttggtaaagacagggtttcactatgttggtcaggctggtcttgaactcctgacctcaggtgatccgcccgcctcagcctcccaaagtgctgggattacaggtgtgagccaccgcacccggcctgtattataagctttaatgtctgttttatattttcctttttaaaaagtcggtattttgtggcagatccactaataaatgaaattacctgatagagaagtgcatacagcagaatatggaggcgagatctgacaaggatcaagacgaagaaagggggagaagatcgttgttctcactggctatggcagaagtgtggtgcagatctttctggcaccaacttgatatataactttggggagccaccgtgatttattattctttctattattccttttatcccttagcaaagcaggacaagtctggtctctgggttgcttttttgtttttcttttttgagatggttctcactctgtcgcccaggctggagtgcagtggtacgatgatggctcactgaagccttgacctcctgggctcaagcaatcctcccacctcagcctcccaagtagctgggactacaggcacatgtcaccatgccgagctaatttttgtattttttgtttttttagagacggagtcttgctctgttgccctggctggagtgcaatggcgtgatctgcaagctcctgcaagctccacctcctgggttcacgccattctcttgcctcagcctcctgagtagctgggaccacaggcacccgccaccatgcctggataattttttgtatttttaatagagacagggtttcaccatgttagccaggatggtctcgatctcctgaactcgtgatctgcctgcctcggcctcccaaagtgctgggattacaggtgttagccaccaaacccagcctaatttttgtatttttttgtagagacacagtctcactatgtggccgaggctggtcttgaactcctgggctcaagtgatcctcctgccttgacctcccaaagtgctgggattacaggcatgagccaccatgcccggccattagtctctagttcctaaacaactttcctaactcttttctgactttcttgtagaagtgtaaagtgctggagaaaacactgtgcatttttctatctgcttccaatacttttcagatcagatctgaggattataattcatacccctaggctgggcacggtggctcatgcctgtaatcccaatacttttcagatcaaatctgaggattataacttgtacccctaggccaggcacagtggctcacacctgtaatcccagcattttgggaggccaaggcgggcagatcacttgaggtcaggagttcaaaaccattcttgtcagcctggtgaaaccccatctctactaaaaatacaaaaaattagccgggcgtgctggcacatgactgtaatcccagctacttgggaggctgaggcaggagaactgctgaacccgggaggcagaggttgcagtgagccgagatctcaccattgcactccagcctgggtgaagaagcaagactctgtctcaaaaaaaaagaactaaacctggacggaagcacctgtgtcttcctgggcactagttgtaaaagcaacacgttgagttcagattttatcctggcatgaagtagaatccagagcagggagcacgttcacagtcctgtgtgggaagatcattctgtgaatagtttggagaagagcaaggtaggaggctccaaaaccagttaagagcctattaattaagaggccggtgcggtggctcacacctgtaaccccagcactctgggaggctgaggtgggaggattgcttgagcccaggagtttgagaccagtctgggcaacagagtaagaaccagtttctgtaaaaaaggtttttaaaagttagcccggggcacggtggctcacacctgtaaccccagcactttaggaggctgaggtgggaggattgcttgagcccaggagtttgagaccagtctgggcaacagagtaagaaccagtttctataaaaaaggtttttaaaagttagcccggggcacggtggctcacacctgtaatcccagcactttgggaggctgaggtgggcggatcacgaggtcaggagatcgagaccatcctggctaacacggtgaaaccccgtctctactaaaaacacaaaaaattagctgggcgtggtggcgggcgcctgtagtcccagctactcgggaggctgaggcaggagaatggcgtgaacccaggaggcggagcttgcactgagccgagatcacaccactgcactccagcctgggcaacagagcaagactccatctcaaaaaaaaaaaacattagcccattaccccggcatggtggtacatgcccatggtcccagctacttggcagggtcgaggtaggaggatcccttgagcccaggagatcgaggctgcagtgagccatgatggggccactgcactccagtttgggccacaaagaaagaccctgtctcaaaaagaaaaaaagaggctcagagaagacattacttccaattagattaatcagaaaaggtaagttttgaagggcaggaatatttaaagacagagctgaggggcatgagtggagtgttgtgagaagaaaaaagaattactagcaaaagttcacaagggtctgagtgtggcagctcacatctgtaatcccagcactttgggaggccaaggcgggcagatcacttgaggtcaggagttcaagagcagcctggccaacatggtgaaactccgtctctactaaaaatacaaaaaaattagctgggcgtggtggctcacgcctgtagctggggtcaggaggctgaggcaggagaatcacttaaagctgggtaatggaggttgcagtgagctgagatcgcaccattgcacaccagcctgggcgacagagcgagactccatctcagaaaaaagaaaaaaaaaatgtggtccccaaccagcagtagcatcacctgggaaatccaaaatttcacacccacctcagacctttctgagtcagaaactaactctgcgctcagcagcttaaccacctggttctcagtgatggtttaggacagcctcacggacctccagtaagcccagcccctcaccaggccaatactctatgaagatgaacagatgatgctattacgtgcccttcactgtggagacagaagggagggaccgacggtgctcagggctgggcctggaggaccccatccggagcctggagtgctctttatcaccggctgcccgtgggaacccacgactcacggctggaggccccacgccccctgccttgtttccatctgctgcagccagcgacgtcaagccttattccatctgtcagaccaggccagacgataaatgtcctcttgtggggaaagtgattcagagagaaaagctaagagccactccaccctcacataatccacctcacataatccaccctcacataatccaccctcacataatccacctcacataatccacctcacataatccaccctcacataatccacccctcacataatccacctcacataatccacccacactcacataatccacctcacataatccaccctcacataatccaccctcacataatccacctcacataatccaccctcacataatccaccctcacataatccaccctcacataatccacctcacataatccaccctcacataatccaccctcacataatccactctcacataatccgcctcacataatccaccctcaaataatccaccctcgcataatccacactcacataatccacctcacataatccacctcgcataatccacctcgcataatccacccaccctcacataatccacctcgcataatccaccctcacataatccaccctcacataatccacactcacataatccacctcacataatccacctcacataatccacctcacataatccaccctcacataatccacctcacataatccaccctcacataatccacctcacataatccacccctcacataatccacctcacataatccacctcacataatccacccctcacataacccaccctcacataatccacctcacataatccgccctcacataatccaccctcacataatccaccctcacgtaatccacctcacataatccacctcgcataatccacccaccctcacataatccacactcacataatccacctcacataatccacctcacataatccaccctcacataatccacctcacataatccaccctcacataatccacctcacataatccaccctcacataattcaccctcacataatccacctcacataatccaccctcacataatccaccctcacataatccaccctcacataatccaccctcacataatccacccacattcacataatccacctcacataatccacctcacataatccaccctcacataatccacccctcacataatccaccctcacataatccacctcacataatccaccctcacataagactgtgcagctgtctggtctccatttctgccgggtggggtattccatcctcatctcgggcaacatgtcccaaaagtatggtttccagtatggctccttaggtcccacccatttcttctctgggaccccaaagacccaacccccaccttttttttcttttttttgacacggagtctccgtctgtctccaggccggagtacagtggcaccatctcggctcactgcaagctccgcctcgtgggttcaagcgattctgctgcctcagcctcctgagtagctgggactacaggggtgcagccactatgcctagctaatttttgtatttttagcagagacagggtttcatcatgttggccaggatggtctcgatctcttgaccttgcttcagcctcccaaagtgctgagattacaggtgtgagccaccgcgcccagccaagacccttaaaagaaggacacttcacttcctcttacaactcagacatacctgtgaggctcctgggctatggaacaccccagccctttcgcagcccttgatggaaattgtttttcagccctctgaataaaatgaccactgtttacttaatcttttttttttcttttttttgagacagggtctcgttccctcgtccatgctggagtgcagtggcacgatcatgactcactgcagtctcaacttcccagactcaagcaattttcctgcctcagcctcccaaagtgctgggattacaggtgtgagccaccatgcccagcagaggaatcttttccgatcaacatcttctgagagtccctggcccaagtaggcagatgcttgctacggcactgccttcaggccattagcaaaaagtgtgcttaaatgcccagaggtgttcccaggccacgttttgttcatacgaggagtacaaaatgatgccaaagtgttagcattcttgggactgaaaacctctctccaacatcccctaggattttcctggatatgaccagaaatccattcccaatttctctgcctccaggccccaattctggtttcctcaaagaggaggaagtgttcttggttcccaaaatatgcttgcagtgcagtggtataatggtaaatgtttaacaacaataacaaaaaggccctaactggccgggcgcagtgactcacgcctggaatccaagcactttgggaggccgaggtgggtgggtcacctgaggtcaggagtttgagaccagcctggccaacatggtgaaaccttgtctctactaaaaatacaaaaattagccgggcatggtggcatgtgcctgtaatcccagctagtcgggaggctgaggcaggagaatcgctcaaacccgggaggtgcaggttgcagtgagcggagattgcaccactgcactccaacctgggtgacagagcaagactctgtctcaaaagagtaattttaaaaagtaaggcaacaaattatcaggagtttttgagctggttgttaagcacagttattattaaaaattacattctatacatttataataaattacactaaaaataggtaatatgtgctcaaaactcatcccctcctaaaaattttactacactgtactcctatctatgctgttgaggttatttccatagattgtatctgtgtgatagaaacaccatgtaaccacatgctgctgtacgtcttcccaattctgactgatgacctcgcttggtagtttgaaatcagccatgatggggatattaacaccacacaagtcagcaaatgctgtcagttaggatttttttttttttttttttttttttgagacggagtcttgctcttgtcgcccaggctggagtgcgatggtgcgatcttggctcactgcaacctccacctcccgggtttaagagattctcctgtctcagcctcccgagtaactgagattacaggcgcctgccgccacctggctaatttttatatttttagtagagacggggtttcctgcttcagcctcctaagtagctgagaatacaggcgtgcaccaccatgcccagctaatttttttattttttatttttttaatttttagtagagatggggtttcaccatgtttgtcagactggtctcgaactcctgacctcgtgatccaccggcctcggcctcccacagtgctggatgacaggcgtgagcccccgcgcccggtccgtgcatttacagcacaagttcacgcttatctacaaagcatccacctctcaccgcaccttccgggaccacgggatttaacgcctcaccgcccgatgacagcacgaggtggaaagggcagcgacaatgctcgcgcgtcccctcccggcgatccggagcacggcagccccggagcgcgcggccactcctcgctcccctcaggagctcgtaagagccccgcgcggggccgaggcgcgagagcacgcgcaacgcttcctgggaaatgtagttgggtgtcggattagaactacaaatcccggtactcaccgcgctgcagccccgaccgtgagggcgctttctggtgaatctgaatctcgtttgtctgtgacatggggaaagctgtccaagcccaattccattttcacaagaggctttctttttggaaacatgatagcggtctcgctggtgtgcgcaccaggagcgttgcggccgcggcttcctcctgcggcgaatctgccgttgcatcacagtggctagtctcagggcccgcaacgtgacgcttgtcgaatctgctgcggggagaaggacgcgagggttgcttgggcagcgactgtcatggcggcggccgcccccaatgccggaggctcggcccctgagacagcgggttccgccgaagctccgctgcagtacagcctgctcctgcagtacctggtgggtgacaagcgtcagccccggctcctggagcctgggagcctgggcgggatcccaagtccagccaagagtgaggagcagaagatgatcgagaaggcgatggaaagctgcgctttcaaggctgcgctggcctgcgtgggaggtgaggccgggcgatgggacccttgggaggctgagggcctggacggcagtggggatctctgccgagaagaccacgcgcctgggaggcgagggactgcgggccttgaccttgaccacaccctcgcctcgttcgtgaatcgggcgtcacctctcctgccccctcaggccggctttcctgatgaaaattgggttagagaatcggtgctgtggttggggcctgaaagttattacatgacatcctggctaacacggtgaaaccccgtctctactaaaaatacaaaaaattagctggacgtggtggtgggcgcctgtagtcccagctattcgggaggttgaggcaggagaatcgcttgaacccaggaggcggagcttgcagtgagccgagatgtgccactgctctccagcctgggcgacagagcgagactccgtctcaaaaacaacaacaaaaagttattacgtgggtgacttcattcatccgttcattcccttaaattcattctcttaaataattctttcaacaaattgttcctaagcaatatcacgtgccaggtgaaagagacaagagcctggtcttcatggggcctgtattatactatgtggagaagaatgttgagcaggaacactgcagaggaaggatgcagacatatggaaatgcacatgcagacgactctagggcagcagttgtttgaggtttgaaaaactgaaagaccattgtgactagacagccccgagcaaggagagacgaagtctgcacttgtccttctgtttttcccttaagttgaaggggaggtgcccatgattttattaaactcatattgaccatgaggtcatgagagggcatccatctggacatgtccagccggctcaggaaggacagatgtggcagcagtgtgggatttgccattaggtagctgtgtggccttgggagaagttgcttaacctctctgagcctcagtttatagaaaggagaggctaatagcatctgtctcactggattattgtgaagaatgaatgaggctgtggcatactggcatgtgctcagtaaagcattactgtgaatgtcacagtggccaagagagtgatttgcaaagttgatagctgaagttgagggtggctggtttacatatgagagaatgtagagagaatagagggttaaagatggaatcttgagaaatgttagggaatgacaggaggaagaaatcttagagacggagaagatgatgtcagtaacatagaccctggattgcaagtctccaggcaagtggagagtttgagtggcaagaggggggtgtcctctgcaccggtggtcatccaaaagcatggtcccttccaggatgatcccaatagagtaatgcagaaaacatgccaaagacaccttcatctctgtgtttgcttctaggatttgtcttaggaggtgcatttggggtgtttaccgctggcatcgataccaacgtgggctttgaccctaaggatccttaccgtacaccgactgcaaaagaagtgctgaaagacatggggcagagaggaatgtcctatgccaaaaatttcgccattgtgggagccatgttttcttgtactgagtgtttgatagaatctgtaagtgtctctgccttctaagaaatccttgctggggccaccatttcattacttttaaagagaaattgctctttaaaagtcatttgaaagttgttactagaaagcaaatcagaagcatcagatacattctaggttgaacttccataaaatagtccctgtggcagactttgtgtgtgtttacagtatgggcttgcattattttttactttttgtaggctagaagttagctaatgattttaaacgagacttattggagagccccttgaagaaattttgattacattccaaatgctgggcttggtttcagcactctggtgccacctgcaggaagcatctatgaacgcatactatatatatatatatatatatatatatatatatatacacgctgtatacttaggaactatattttcaagaaagattaggtttcctttgggtagggactgaatgagctaacgagcaaccctgtgtattcctccttaatggtctgccttggcttgtttctttggctctaacgtgtacttccctgcccacagtaccggggaacatcagactggaagaacagtgtcatcagtggctgcatcacgggaggagctattggtttcagaggttagtaaacggctctcgaatgctttttctttgtggccttggacaacgtgctgaggttgtcatttccaaacacacgagtgttccagggacacttgatcttcttccctctgacaaataaatcatgtttgtttctgtggtaactcggttttggaaacttgtaggatctagatgagggtttcccatcgttggcactactgacatttcgaccagacgaatctttgtcgggattgggtctgttttgtgcattctaagacgttgagcagtatccctggcctctacccacgagatgcaagtagcacccccgtccgttgtaacaacttttttttttttaaagagaccgaatctcactctgtcgcccaggctggagtgcagtggcacgatgtcagctcactgcaacctccacctcctgggttcaagcgattcccctgcctcagcttcccaggtagctgggattacaggcacccgccaccatgctcagctaatttttatttttttagtagagatcaatttcacctggtctcgaactcctgacctcgtgatctgcctgcctcagcctcccaaagtgctgggattacaggcatgagccaccacgtgtggccaacatttttctcagtaattctagacaattgtcttttaattttagatataaattataatggtaatatctttctgcccttggggattctgatttctacccattgaatgctaagtacagatattctagaaatattagattatcagctgcaaaaaaaaaaaaaaaaagaaaaccaatttgctgcctcttctccccgttggcatgtccattcagagcgtggtggagggccttggtgacttgactttcctagaagcagcagtgttttatcactgggccactttccatctgtcatgccctaacttacccagagcaaaaagccagttttctcatcttctgagagacaggatgatttgctgtcatgaaacctggttttgctcctcaagcaccatttatgatgacggactgacttctccgccggtcgtcccattgttcagcttcaccagggcctctttgagaagctctgctgtctccagtactgctttgatcaccttcccaggaatgtattccataaacaaatcagggtcaaggccatatgctttcatttgattccgagggctgcttctctcaaccagtttcctgcctgcgaggggctatttccctaagactagaaataccctttgaaggagaaaagctaaacaaatgtagttagataaagcgcactggattagatcatatacactgcttcattgatgtcttccagagctatgatcgtttgaatgacttacagtgcttaagctcatttcatgacactgagggtgtgccaactttccgtgagtgcctcgtgacccagcagctgtcaccacaggtcatgttctttctgtttgtttgacagctggcttaaaggctggggccattggttgtggaggttttgctgctttctctgctgcgattgattattacctccggtgagagtaattgcctgcagggaaggatgatgccagccccggatccgggctgctctctggaggacagtttctgtaccacaccagggccttgcttcagggcctgaagacattcattttccctcatgtcgttggtattctgagggagctgcctggcttctctgcctccagcctttggggtagccacactttgctgctcctggactccagccagccttcacagaggacgtcccgtgccagattctctcacagcagatcgggagacaggatgttgacatataggaattcagctccacaaagcttcaggcctgaccacagctggccctctaggttgtttggtgttgtgggcacagaggtgacagtgtctctgcaggcactcaggaagctgttctaccttggaactccatgcaactatccgtctcgaataccagggcagggcaaggcggactgatgccgtccaaccaattatctcacttgttttgtgttctgtcatccttgttttttttttaaaaatacactcccctcccccaccgccacacaccttacagttcaaaaggttggtttatttgtattttattttcaaattccctattccaaaaatagtgccgggtggcccaaagataacatctgaagggaaagaatgagaaagctcccagggaagcgggggatggggcgctgaggcagggttgttagaggactgtgtcatcctcaccaagctcattacatctgccagggcctgcctcaagaagcccagcccagccttttcctgggatgcagtgaaatcccatccatgaactcgatgggcccctcctgtgccggccgagaggcacacactgccttcacgacgtgactgctggacctggccgagcttgaggccacatgtgaagggtcctgctgtggtcatcttggtgactcggtcacagcagctactggccaagatcagacgtcgctgaggggctgttcaccaccatcctcgttctccagggtcaaggaagtgttttaacatgtcgtgttttcgacttgaccttgtggtatttttcttggcctagttgtgtgccatggatattaaaaaaaaaaaaaaaaaaatccgtctacagttgggcttcagcactggtgctgctttaccctggtgctctgtggggggatgacactgctggagtcaggcctttgctcttgggtggggcacaggcaggtcgcttggtgggggccacacagtgctgggcaccttcagccagtggtgatgagtctcctttttcctataatacggtaattcctctatcctttccttttttgccttcttcctcatctgccctgtcttctggcccacacactcttaaccagcgttcacactcagtgtacatggcctggaggcccgagtgtttgtacatgagtgatgatgtcaaacccagctggtaacaccttccttgggtcatgtttgccattttcttggaatgaatgtgagttcctgctcagggctcatgtccttttacagtgaattctatataacgcccctcccagtctcacagctaggaggcttcatcactgctaggccagttggagcgttccctagagctcagaacaaattgtttcctctgctgtccctaaatataggacacctacaagcactctgaagcaagggcagacattcccacctggtacctgtcaaagtcctaggatgcctgggatcttccatctttcagtctagcacgtgggaccaaatacaagagatgctgccctcacaacagccttggaaaagatgagcgccagggctgtcagtacccatcggttcagtaagcgaggcattgtccacgctgcctattcactcgagagatgaatagtttcctgttttcgatggctggggagccagtatgagctcataaaccaaacagcaattttcagagacatctgttcctgatcttcagaataaactcagtgtccagttgcttcggctggtgggagccaatattcacgccactgactctctcaaagggagggtgggccctcggagacccagcttctctgacaagcagattagaccaaaaggctgcctcaaagatatgccactttgaaggaaagcgtagagaagcgtttacataaaagaagacgcttcctgttcagtggacaacttcatgccactttcaaggcacaccgatggccaggtgggacatttgtactgtagcagcacatggcaaaggtgagccagaagcagcctggatgctggctgatccggaggcctttgtgaagagcaaggagagggctccagcccacctccccgcagctctgccccagcccccgtgggccacagggaggctcaaggggagtgaactaggtaaacagattcctggaaactcacatctggatgcagctggaagagttaaatatttacattggtggcttccctggaccaccgcgaacacaaacatccacaccacagggctgagttttgtgcaaatgatggggctttgcattttttattaacattttcctctcacgtggtttacatcaatttataataatctacataagttgaaacagaacatagacaaaaaaatatatccttaccaacttattaaagtcagatattcatgaagggtcccatcctacctgtgtatcagcagaaactggcagccatcagccattgcccagcaagaacaggcagacctggcgtttcttagcctgactcctgctgggcacagcccaccctgctgggcacagtgactggaggttccaggctgcacagtccctggctcctgactcctgccgggcgcagtgactggaggtttcgggctgcatggtccccggctcacaggagaccctgctgggtgtttccttggtgcagtttagtccaggtctggcacctgaccctccccactctgggggtgggatttataaatatgagcctttgcatttctcagcctttgcagccttcccatagcctgttctcacgttgcctcagcgagcttggggctgtggggctccctgaggctgagacgcgaaggtgcccagtctgggccgtgactcactctgccccttcctgtccatcactttggaagcaagcaggagccttctgtgccacacaccgacactcggatgccaggcagggaccttaggaagggccaggcactgcatctttagactcaagttcaccgcctttcccagggagcaagggctccttgctaagctgctcacaggcagccgatggtcagtacttccttcctcttgggcatgtctttcctccgtgcacagagtatttactgttctgcccaaggccacaggagtaaacaggctcaaaaagggcctctcaccgcgcacgcgctgcagcgttagggccggcaaacccttctttaagactcagccctgagcacaagcaatgggaactgagctccccagccctgagggcccggaaacgacgctctgccacacagaagagccggggagctgtaactggctataagtcgagcccctggagctgcatctgctctcctaggctgatggcccgaggctggcagccgcagctcgtgtgggaagtgtacggtgggaacacacctcactccttcctagtaccgggcaatgcgtctgcaagtcgggtccctgctccctggcgggtgcctacagcaccaacaaggaggccccagcagaacccagcccctagaggcggctgtctgattccccactctccccacaacttctggagttcccagtgtttacccaaaaggctgtatccagaagctggggcggcaccacaatggctggccaccgtgggcctgtgcctttgcttcccaggtcctggaggaccgtggcagtgcttggctgtggagtgtgtgtaaaatctaaggcaagagtaccacgaggtcctgcggtgccagggagctcctggctgcagcctacctgcctggacacctgcttcggccacatcagtcaccctccaggaagcctggcccctcttgaaaagcccccacaacttgctcctaagagctgagctgcctccccgcgacccgggacacccagcgtggcatgtgcattcctcccccgttcagcctgtggtgtttcctcagcagcctgaccgcctcctcccccattctctcctgaccctctggctatctcgatagcaggtcacctgtgagtctttacactcaaaggaaatagaacagcagggaagggaactgaaaagcagtagaagaaacagtcagagatgcctcactgatagacaggaggccgaacaggtaaaccccagaagtggagattcccaaacggaaaattccagaaatgggcgctccagctctgtgctaagctggggacgagtgtgagtgtgtctgcttgtccaacatttgcacaggcagcaaggcaaagcaggtgtgctcccaaaggcggagtctgaggaggggccggcagcggcaaacggcagcatcaaacagaccactgctgccgcggcaacccagggcctcttcagagctttcaaggcgatggagcgaagaccaagggtgcacatgcatgcaggcaggctgggaaggaagagcgggtggaggaagactgaggggaggctgccaggagaccgccatctgggagcagggccaagagagaagctggcagcagttacacagcgcaaaataaaaggccttgggctggactcaggcggaaagaaagtgctggaggaaatgaaagaacaaagcgggctgtctgtgtgcccacgccgggccggtcactaccttttctgcctgacaagtgtacataaaacaattcccgaacagcacggagcatcagacacaactagaggtatggagggcaggaggtgggatgcggtggtgaggctggggctgggcagccggctttgtacaaggtggcacaaaagacgtacgcattccagttcttggaagctggcttccctcgagtctggagtgctgggtttgggagttttctattgcagtctttcaagtctgagttggaccccaggctggaggggctggttccaccacccgcccgcagccaccctgcctcgggctacacgtcggtggagaagtacagtgtgttccgcttgagttctgcgaaggaaatgggggggtgctgcaggtagtagaggaggacctggacctgtggggagacaggaaggcggaggctgggctccctgtcctaggcctcgtccttgctgactccagcctgtgttgcccctcccactccctagactggctccggccaccgccccttcctggggagcccaggtgtgtttgcctttctgcagccgtggaaggtgctacggggcagagggtcgggggcctagggccacttccccaacctggccataagcttctgctctgtcctgaggcggccacagtccggcccctgctctgggtcttgcaggaatcccagggaagcctcccgcccttggaagcaacctcagagcttccacccatgaggacaagggcccagcatctccccacccctgggcttgctttctgagactgaggccctcctgagaatgcagccagcatctctgggccctggtctaggctcacatgtttgttttggcctgggaggggcagaagtgtctacagtcctgcctccctggtgacaccccatagcccatcaacccagcttcccacgagggaagaggtgtggggactctgagctgttctctctcctcctaaggggctggtctcaccctccgccagccacgggcccgggcggtgccagggtacctgcgccatgacgtcatgggaccgtcaccctccgccagccacgggcccgggcggtgccagggtacctgcgccatgacgtcatgggaccgtcaccctccgccagccacgggcccgggcggtgccagggtacctgcgccatgacgtcatgggaccgtcaccctccgccagccacgggcccgggcggtgccagggtacctacgccatgacgtcatgggaccgtcaccctccgccagccacgggcccgggcggtgccagggtacctgcgccatgacgtcatgggaccgtcaccctccgccagccacgggcccgggcggtgccagggtacctgcgccatgacgtcatgggaccgtcaccctccgccagccacgggcccgggcggtgccagggtacctgcgccatgacgtcatgggaccagatgtccgcagccgaggtgaggtgtgctttgctctccacttctgagggtctcagtaacgtgggtccaaacacggtagccaggttgtgaagtgacattttgttgatgggctccttctcggcaaccctaagaaggagaagatggggaggaaagaagcccttcctcagcagccactcggagctccaggacccttggccttcgctgtgggaactcctgaaggactcctggaaggggtcacctcgtctctgtctcctaggagtggggacctcccccgggggaaggggactcatccaggagagcagggccccagccatgtgccagtgttctgtgctaacatctccagctgctgggtccccctgaactgatggtgaactgccagagccagggagcccacagatgccaactccagctcccttgcctgagagcagatactgttctgaaaactccctggaacaactcacactcgccgcagtcctttgaggtaaatatgattatcgtcacccccatcgtgtagatgaagaaaccgaagtacagaggggttaagtgacttgcccaaggtcacacagccagcaactggtagagctgggatttgaaccccggtagctgcctccaggacctaccgctctgttgctttctcatgtgctaagtggcccaaaagaagagttaaggtgggtggggcaggggagaaaggcaggcagggcctggagcccagcaggagtcactagctagacccggggctctgccagctgtgctggggcaggagcagccctacttccagatgagcccggggactgtccccccgtgcctgtccggaaaggtcggcctcgtgggacccagggcttcctcttgtgcctctccggaagggtctgcctcatgggacccagggctgcctcctatgcctctccgtctgcctcgtgggacccaggattgtcctccctctggatcctctcctgcttctcttactcaacaggccagatgctctgcgatgcttccctggggtaacagcaggagctgccatcagggctggtgtccaggcaggcccagggtcagcaaacatatcagagggcctctggttctccttcagtctcaaaaaatgtttctgggctgagacccacccaccctaagcagcgcctctcaccctcaataccatcattcccaccctccaggcaggagctgtggctgcgcctgctttggaaacaggcaaacaaacactgtgatgccaacaggcagctgtgcagcggggccagcccctcaccacacgcgcgcacacggtccagccaggggcccagatgtgggaacagactgtgcccagttcccagggtggaagccgaatgaattttcccttcccactcctccccacaaggcttgccaaatgctttcggaattggttggggctctagtcctggccaaaccagaggaaaaatgtttcatgatgggaaaaacaagacaccagccccgggcgcgtccaggtctccactggctctcccgagcctggcgtggctgagctgcagcggggggcctggccctgagctggggctgagctcagggaagaattgttccgcagagcagtctgagggggctccccggtcctggcgtgcaggtgggtttaagggacgcccagggaccacctccccacgcaagcctgaggacctctgaactttgctacaagtacaaccaactttagccactcttggttggacctgactagaaagggtggtgggaaggcaagaagggtctgaatttaggatctggaagttgagggctctaaggacaggtctgctactaacccaagcaagtctccgcctggtgtggggactcagtttccctatgtctagtgaggtgtgggccaagaccagtgggtttcaccttttttgactgtggcccacaatacaacccatgctgtaacacagtccacacgtctctatgtaactgaaaagcagcacctgcatcaaggcttacaatgtatcctcctgctgtctgtcccccactgctgtccatccccactgctgtccattcccccactgctgtccatccccactactgtccattccccactgctgtccaccccccactgctgtccaccccccactgctgtccaccccccactgcatctagaaatggctacattcgttgaatgaaccaccagtaggttgggacccactgattataaaacctgcctgtagtcctgggctctcaccctgccattctgagcattctatggtcaatatttgaggttactactggttacgggacccaaatatttctcaaaacagaaaaacatgagtgcaagaacttggaaagcaaactctcactccccacagacagcccgatggaggccagcgcccacgaggagggactgaggaggtggggttggggccactccccgttaccttttcacgaggagggactgaggaggtggggttggggcccctccccgttaccttttcatgaggagggactgaggaggtggggttggggccgctccccgttaccttttcaagtgttccagcaggaagaggaaggtgatgaggttggggtcgggcagggagcggagcaggtgcatcatgcagttttccttggcagcagggtctgacagggctgtgggagagaagggccagtgtggcgtttggctcctggggctccccgccagggcccctgtggtcgtgaggctgtgggcccctgcgggagagagcccaggcttccaggcctttggggagcagaccccacaggggagggcctggtgtctgggtgggctgtcagcagctgcttcctccaggaggccccaccacgactggtaactcagccaggaggccggctggtgggagcagacccccttcctgcagctgactgcataggccttgggtgctggggcatcccctgtctcgtaacaggacaccccctggtctgtgtggctaaggttaagccagtagggacatatcctgccagcggtggattctctttctccaccccttctgctgctggagcgtgggtgcaagcagccttccgtgggggctgaagctccagtctgccccaggagcagagaaggctgaagggattccttggggctgggtttggcccaggtgggtggaggcggaaggcctgctggccggggccctccgcagaggtgacgggacggtgtgtggtcccgctggaaggctcagcacaacccatctcgagtgccctatggcttaagccagcctcctccttggttctgggatgctggcttctggccactcacctcagggcagtcttccctggatgctcgagcttccaagcaagaggccaacgtccaaataggaagcagaaggggctgcccatggggacatcaggggcaagaggcaggcgagaaagggcccagtgtctgcaccaggtcccagcaggccacacctcaccctcggacccctcagccacaggccccagtgcactgggaaggtcagccagcaaaggaagccacagatatttctcctgctggttacttctccgggcagggagtcctggctcagtctggcccagcccagtcctaggagccctcagggcctcaccgatgccctccatgaaggctgggtagagtcggtccgtgaggagcggctcgggcagttcccggaagtacagcttgagcgtcccggcgatggcgttgatgtccatgtcactcagcatcagcaggatgtccttgttatctgcaggggtggggccgaggtcaggcagccttagctgggccagcagccccgttccacccccgacccatcctgacacagcccccacccactccagctctggttctggtctcccctggaagagcaggatgtagagagggcccacaggtgtctgtgactcggctctgtgggtcggggttgggggaacagggagagatagcctgggggccatctgctgtggctgcttgggaaagggtgtttggggagtgaaatccatcacccagagttcagagccacattcataccatgtggcctgcagcttccttccgactggaacctctccatcgctaagcccctctctggaaggcattgcacacttttcacacgtaaaagcatgttccgacaaagcctcagcttctaggctgcacagaggcaccaacgccggccagttcccaggccccaccccgtcctccactccaggctccccacggattcatccctgcctggccagtgcaggtttcttgacagtggggtatgtggctgctgcacctgaaccagcaggagcagggaggagaaaccagaaaggtcaggcctcaccatggtgggcttcacgcagaggcagcactgccccagaggggacctggggccctggagacagcaggtgcaggctcaaagctctttccctgcggctcaccaggcacccaggaactagcaagaaagacactggagtcagatctgagttttaagtccagaaccaaaacctacaagttgggtcatcctgggcaagtgagtcggcccttgtgagtttctgcagttgcttacctgcagcaagggacaagagattggaggggaggggattacaagagaaagcacttgccacggggactctgaagcagagcaagcctcctctccagggaggctcctggttcccccgagctctcctgtccatcccaccagcctgctcagacacagccacacctgccccggctgggcctcccagactcactggcatcgaagacggccttgagcgcctggatgtccgtggccacgcccgatatcctgtagatgccaacctcctcgatacccctcttctccacctcctccacacactgccggacgatgtagggcaccttggagcgctcccgcctggggtggagcgtgaggatgggtggagggcagcccccacgacagctctcccgtagcaacccccacccagcacacacacaccctggagagcttctagcatttgggatggagagctggggcgggggcaggggcagggcagagaaagaggccaccgcaccccaccccagccagcccacccgaggcctgccgaaggggcatcgacggacgtgggcaggagaagccttgggaacttgggaaggtaaggccgagactctagggaaagaacgtcccccagattcagatgcttgtaggaggcccagcaggcagcccacatgaggaggtgggtcaggcctgagacaaggggccagggtggtggtgaaccgggggacacgtgccctttcccgaggggccgccagtccccgttggtgccgagcccaaacgtaggcccccggctgacagagcttcccgcttgttacgaggagcagacgatctgggatctcacaagagaccttccagcgtttaggtgctggctcgcgtgcttctgaagtgtcctgtgagcgcctctgcggccactctagatccacaccggccatctgccaccgccgagcggggggtaactgattaggtgccaggatgggcaccggcggggagggctggggggcccgggctgggggggacccggggcaccgacgccaggactgggagacccgaggcagcacctacttcgtcaccacgctgatcttcacaccgaagacgccggtctgctttttggacggggtcctcttcaggctcatatctcggctggtgaatttcatggaaaattccactttgatctggttggggggtgaggcaggtaaagattccccagggtgtgagtgcccgaggaatgcccccaaaacacaggggtcccctccccaagactgcaaatgagggctagctcacacccaggtctccctcaacacaacacctgcaggacagcagcgggcagggtgtgggcaggaggggagagggggctgggctgcggggaggtcgaggcggcacagcggccccaggagcagccacagggccgggctgcccacctgctgcacagacgttccacctcccggctcacgccactgatcattcccatccccggctcaccccgttcatctcaatcacgtccgtgtgccagttcttggtctccacggtttgtgggtccagctgcagagagagaatgtgggtgagagaggtgccagctcggaggccaagccagagatctccccgtgggtcagcactgctcagagccagctacacagtcaggaaggcggaagtgagcagctgggataagctgatgtttacctggaaatcaaccctttggggggaccctagcccccaggcccctgtggccgccgtgggggaggcagggcacaccctgttacccgccgtgggggaggcagggcacaccctgttacccgccgtgggggaggcagggcacactctgttacccaccgtgggggaggcagggcacaccctgttaggcactcctggctgccagcccgggacatgggtattattaccccatttcacagatgcagaaactgaggctcacaaaaggtaagcacctgattaggaggcgctcaagtccatcaggagggaaccagcccatccacgtggaggtgttgaagagtcaggagcccgcgcacaggaggctgcctgggtttgaatcctggcaagttttaaactcactaagcctcagttattccatctgcaacagaacctgcctccctgggattgctgggaagattcagggagaaaacttgggtcaagccattggctcccaaataagcaaatcctccacaggggaagtccccaggctcgggctggagcccagggaggtgcggaccccaggggaggtcagaggcaaccctcacacaggactgttccacgttctgtttctgtaactcgggggccttcgcgcccgtctgcctgtgcacctgcgaactaattctgagcaactgtgcgctccctggcactttctgaagtcaaaatctgaacatttccaagtttaaatagttgcaaagagtatgatttccaaaatcatgtcaatattgccatcctaaaataaaagtgtgacatcattccttctcatggattcagtgggatctaaataccccagcgacgtgatacccacactcatccatttaaaaactacacgaggccaggcgtggcggctcacgcctgtaatcccagcactttgagaggccaaggcaggcagatcacgagctcaggagatcgagaccatcctggctaacacggtgaaaccccgtctctactaaaaatacaaaaaattagccgggcgtggtggcgggcgcctgtagtcccagctacttgggaggctgaggcaggagaatagcgtgaacccgggaggcagagcttgcagtgagccgagatcgcgccactgcactccagcctgggcgacagagcgagactccgtctcaaaaaaaaagaaaaaacatctaaacaatgttgaaaaagaacacagctatagggctaatattacccaatttcagggcttattatataaaactctcaaaattcaatattaagaaaacaggccaggcacggtggctcatgcctgtaatcccagcactttgggaggccgagggaggcggatcacgaggtcaggagatcgagaccatcctggctaacacggtgaaaccccgtctctactaaaaaaaaaaaaatacaaaaaattagccgggcgcggtggtgggcgcctgtagtcccagctgctggggaggctgaggcaggagaatggcatgaacccagtaggtggaggttgcagtgagcggagatcacaccactgcactccagcctgggcgacagagtgagactccgtctcaaaaaaaacaacaacaacaaaaaactacacaaacaagctcttctttccctcacagagctcctggatcttctctccttgaatttgtttctattccatttctcctaaagaatgttgtcctagtttatatttttatattttcaagtcctttattcaccattacattttgcttccacaaaaaaaatctgtatacattgaaaacaaaaatttccagagaccacaaggctccaaatattcaaaatatattcaggattagttagtaccatgattggcagtacataattaaaaagacagccaggcacggtggctcacgcctgtaatcccagcactttgggaggctgaggctggtggatcacctgaggtcaggaattcgagaccagcctggccaacatgacaaaaccctgtctctactaaaaatacaaaagtgagccgggtgtggtggcgggcactgtagtccaagctactacttgggaggctgagatggaagaatcgcttgaacccaggaggtggaggttgcattgagccaagatcacaccactgcactccagcctggcgacagagtgagaccctgtctcaagaaaaaaaaaaaaaaagtaagccgacacattatatacattttatttatttttttgagacagagtttcgctcttattgtccaggccggagtgcaatggtgcgatcttggctcacagcaacctccgcctcctgggttcaagcgattctcctgcctcagcctcccgagtagctggaattacagacacacacaaccacacccggctaattttttgtatttttagtagagatggggtttctccatgttggtcaggctgatctcgaactcccgacctcaggtgatccacccgcctcggtctcccaaagtgctgggattacaggcgtgagccaccgcgcctggcctcattatacattttaataaatattaagtagcagagtaactttttggtggaatgctctctcaatgagatgggcggaacattttttgctttagttcgcgtatctatagggtattattttttgctagagtgaaacgaggctcagcatcaatttggttcatgtttctggttttgttgtaaagatgtgcaggtgctgtggctcccagccacaggaccacttgagcccaggagttcgagaccagcctgggcaatgtaggaccatgtctctaaaatgaacaagaaatatgtgaacaatgaaacattttgttcacataaagaagtagatgaggtcgaaaagagttttatcacagccgcgttacaccattctttaacctctctccatgctatccgccttaaatcgcatatatacctattactgaaaattacttgaaatgatctctcagttgaaaattgagtcctccatcagttttgtggaaggcaaagaactggataccacctgacttttgaaaggttctaagtggccactagagtcttttactttctgaacactgaccccaacgtttctttttttttttttttttgagacggagtctcgctctgtcgcccaggctggagtgcagtggtgcagtctcggctcactgcaagctccacctcccgggttcaagtgattctcctgcctcagcctcccgagtagctgggattacaggtgcctgccaccacgcccagctaattttttatttgtagtggagatggggtttcaccatgttggccaggctggtctcgagctcctgacctcaggcgatccacctgcctcggcctcccaaagtgctgggattacaggtgtgacccaccatgcctggcccctaccccaacatttctaaaagcccctctgttccccacccaggaggtctgcgcaccccgggccaagccccgacagccagcctcaggcctctcctctgcagaggacaggatggcgagatgctggctctcaggcagatggctttctggcaatagcacctatggcagctgagaatctgcaaactgatttcctgaaaactctcctgcccacgtcgccctcagaacgtctctgtgcactctgaggtgtgcgtgccacggtttgaacgcagttgctataacaggccactgtcatcacggaagggaaactggatctgggtcagccttgggcttcctgcagctcgatgtaggtccttcccacatctatcacccacacaccggctgggggcaggtggtacccaagcctccgacggggtctgggtctgcactgggttcgccctgcccagagaagggatggaacccagaacaggagacagaagttgggtgtgtgcagagaaccaagtgcccctcagggagaaccactgctccgggcacctcttcacacacgggaagcgtgaggccatcaccagcccggctggaggcaggggtcctacagggtctcaaaggaagccccagctctggccttactttcccgaaacctctctcccctctaagctgcttctgttctttgcaaaccctcctggatcacacaggctgtccctcgtagttccttcatctcgtctggacacggagccgggcctgggtctgtccccagctctgtcccccagcagtagccacacagggtggaggaatcaaatgctctttgtcaactgagatgctacccttggaagaaacattctggagcggccatgccctcttttttttttttttttttttttgagacagagtttcactcttgttgcccaggctggagtgcagtggtgtgatctcggctgactgcaacccgtctcccaggttcaaccgattcttctgcctcagcctcccaattagctgggactacaggtgcgcaccatcacacccggctaatttttgtatttttagtagagacagggtttcaccatgttggccaggctggtctcgaactcctgacctcaaatgacccacccaccttggcctcccaaagtgctgggattacaagtgtgagccaccatgcctggccaatttttttatttttagtagagatggggtttcaccatgttgcccaggctggtcttgaactccagacctcaggtggtccgcccaccttggcctcccaaagtgctgggatgacaggcgtgagccaccgcactcggcctgtatttatttttctagagacagggtctcactgtgccgtccaggctgctatgttgccctgggcttcagtgatcctcctgcctcagcctcctgaagagctggcattacaggcatgtaccactgtgtgggcccttattttttatttatttatttatttttgagacggagtcttgctctgtcgcccaggctggagtgctgtggcgcgatcctggctcactgcaagctccgcctcccgggttcacgccattctcctgcctcagcctcctgagtagctgggactacaggcgcccgccaccacccccggctaattttttgtatttttagtagagacggggtttcaccgtgttagccaggatggtcttgatctcctgacctcgtgattcgcccacctcggcctcccaaagtgctgggattacgggcgtgagccaccacgcctggcccgggcccttattttttaattgacacattgcagttgtatgtatttatggggcgcagttcgatgttttgagaccaccccttcttgaggcaggtctctccacacatcagcataagcctcaggccaattccatggcccctggtccgattcacccacagcccctcctccgccccagcttcccacgactgggtgcctcctggcagcttctgcaggaagctgagccaatggtcccttcccaagtctcagggggacctggacacaacctggtcggggggagtgtgcaggatttggaggcaggctgatctgagtctcccattcaaccgtgcgcactcgggcaaggcctttcacctccgtgaacttcaatttcctcatggaggcatccacacctgactcacagggctgttatggaagagtgagagcaacggacttatctcgagctcttcctgcaagtctgacactgatgaatcctctacacacagcatctgcgttcatgatcatgatagcagacatatgcggtttaagctctcatagccgctcccatctcacagatgaggatgctgcagcttaacgagagtgaggaatttacccagtgcacacctaggaagtcagagctggggttcaaaatcaaggcccccagcaccctctctgctgaaactgcagaatgtgtgaagtccatgacccgcagctgctgtaactgctgcttcctcagaaaggcaacatcgggcctcctggtgtgtgtcccgacccggtgggcagacctggtgctgggaggccacccccagtacagccctcccgctgcctcgtgcccatcacttccgctccagctgccaggttcaacctgggcacatctgacccaggactgcacctcctgatgctaaggcccagttctcgccccgcctcctccagagagccttctcggagagccccaggtcacagtgggaaactttgggtcctctctgccttcctgctccactaagatctaccctctgcagcctcccaggcgacacttgctgctgtctcacacactccagccccttctgaggccaggcctgggccaggggcactttcctaagctgtaagcccctcaagccctgacatcttcctggtgcctgctgcaggtgtggccctggtatctgctgcaggtgtggccctggtgcctgctgcaggtgtggccctggtatccgctcagagaggcctgcctggccccacggtgccctgacaacgacgctctgtttcccaggaggctatcagcctccagaaaccaagtctatttcaggatatcatttaaacacagaggagggagggagaggcacagcgtacattttccagagaaacgctgctgcccgcaactgcgctggctatttataactcctgggaaatgtggactgtgctatttcctgatgagattagcaccggggtggaggggctggcccctgggacgttggtggatgggacacctgactgctcaccctctggtcccagcagacaggtgccttccatgggcccaggggagcaggtacttgggggatgtctgatcacctgaagcagggagacagagggagctcgtgaagggtcaggctgggaagaccaccaggggcacacgagcactggggcctccccaaggtgggccacaggcaggagacagaaacaggctgcaaaacatcgtggagccaaaaggcggacgaacgactgggccaggggtcgacgactgggccgtacatggtcactgagagcagctcaactatttccttcttttttttttttgagacggagtcgcactctgtcgcccaggctggagtgcagtggcgcgatctcagctcactgcaacctccaccttcgggttcgagcgattctcctgcctcagcctcccgagtagctggggctacaggcacgagccaccacgcccggctaatttttgtatttttagtagagacggggtttcaccgtgttggccaggctggtctccaactcctgacctcaggtgatccacccgcctcggcctcccaaagtgctgggattccaggcgtgagcccctgcatccggccgactgttttctctttgtctgggcacttcgcctggtcaaatcatgactgcgcattcaggcctctcccaaagagaaacgctggcgctgggggctcatgtccaggagacgaccaggtcccctgcggcgaaaacccagcaggcaggggcaccgggttgaaatggggctccgtcacctccgagggagcaggagtgaagacccgaaggtgagcgtggattctctgccaagaatcccgtaggtggctggtggaggtcgcctcgcctttctggaccgaagtgacctcatgtttggggcaggaatcagcaaagtggccccgcagcggggagaggatttgaggctccagggcagagggtgctccacgcacacctgagcgtcctccagggctgagtttcaggaacatcctggggatgcccctgagggtctcagcccttcctctcggctcacctctcaccccctggggcaggtgaccccatttctcctgcctctgcccggagggctgctcccggccagctccccgtgctcggattcaggggcacgctccctccggtctccactcctgctccctcggaggtggcagagcccccattccaacccagtgctcctgcctgctgggccacactctccactccagcacgcagctcgccccaaggtcttcggagatggtttccaccacctcccctcccacaagccctcacccagggccctttaatccacagtaaggggcctgtggtggccctgcccaaggcaggtgggacttagaactggccactgggggtctcagtggaggggggagcagaggtcccaagcagccttcagtggacgccactcaggacgtgatccaggggctcactggacgacgggaatctgaagaccacatttgccagggccccaagagctcccaggcctccgcctccttcctgaaagccgcttccctcaggagcccactcggtcactcccaccgcccaggagctgaccccccgaggagccctgcctccaggcacagccctgccctcgggggccgccccatcctgcctctcacggctggcgctcttctaccctccaccctctgagccccggcatcccagaatgcgggagggtttccctcagagggggttgcagaggttcataaaaaaaagtgcttcttcagccaggtgcggtggctcacgcctgtcatcccagcactttgggaggccgaggcgggcggatcacaaggtcaggagatcgagaccaacctgaccaacgtggcgaaaccccgtctctactaaaaatacaaaaattagccaggcgtggtggcgggtgcctgtaatcccagctactggggaggctgaggcaggagaatcgcttgaacccgggaggcggaggttgcagtgagccggagttgagattgtgccactgcactccagcctggcggcagaaaaaaaaaaaaaatgcttcttcacaacaaaggtggtaaatctgttcctgagaggtgggacaggaacgctagaaaatgactcccagccgggcgcggtggctcatgcctgtaatcccagcactctgggaggcagaggcgggcggatcactcgagctcaggagttcgagaccagcctggccaacctgacgaaaccccatctctactaaaaatacaaaattagccggaaatcacttgaacccgggaggcaggggttgcagtgagccaagatagcaccactgcactccagcctgggcaacagagcaagactctgtctcaaaaaaaaaaaaaaaaaaacagaaaatgactccagaaggacctcagtgcaagtggcccccggacagggaaccacgtggaaggtggagctgtgtgggcacatttcacgcctgccctggaggggccgcggagcccaggccctgagccaggcatcgggtctgagggtgggcacgtttcctggggctcccaggccagcggccacggtggcagcccgggctggctttcccctgccctcccccaagggcagccccacgctcagggctgggtccccttgggacaccgaagccggcctgtcattggggcagaccacaggcgtgagaggcacggcggggctggcaagctggcaacgggggagacgggagttgccaagaccctgcctctcctccctcgaggaggcgccggaggattccgtcaacgtgactgctccgagcgactccgagagaggcagggcagagagggaggggctgccaggacctacccctggcttccagctcagcagctgggttggggacaccgggccaggctccataaactctccacacatcttcccatggcttggcatccacactgctaggccaggcaggctccgcctctccagccctcaccctgcagggtcagccaggctcccttgtagccaaggtgtcctgcagccaaggtgtgcccacctgccatacccaggccagccacagataggctcgggctgatgccgtgtcccagggcctcggctggcttcccctccaacaccagagaacttcgaagttccccaagcctcatgggaggaaggggattagcagctctgaacgacgcttttgtccaaggcaggctagcctcttagcacccgcagcaacctgccttccccagcgtccattctagcacctctgcctgccccacgtccgctccagagcctctgccggccccacgtccactgcagagcctctgcctgccccacgtccgctccagcgcctctgccggccccacgtccactgcagagcctctgccggccccacgtccactacagcgcctctgccggccccacgtccactccagcgcctctgccggccccacgtccactccagcgcctctgccggccccacgtccactccagagcctctgcctgccctggcacccactttgcttttagcccccgggctgggcatggctgaccttgaggagaagcagacaaaatccaaacctgggctgctcttggaggccccacagccaggcacatctcccccagcggcctagggctccgtcttcctcagggccagcccaccccaccactgcctccctgtgcaggcagcctggaggcttcagcttcagctcagaactgggctacaaataccagccaggaagccggccctgccccagcccagggcaggtcgaggatgccagagtggcaagggcaggggcagtggggccctcttgagaaaaggaacaggccagggccaaagcaacacggaggccctgtcctgaaaggaaaggggcgccctcagaggtcaaagtccaagatgagaggccttctgtggtcctgaccaggaagcttcacgctggaggccacgggaaggccaaggacctgtcagacctccatgggctctgaagcctcgagctggacctggagtggttaagaaacattaacagggctgggcgcggtggttcacacctgtaatcccagcactgtgggaggcctaggtgggaggatcacctgaggtcaggagttcgagaccagcctggccaacatggagaaaccctgtctctactaaaaatacaaaaattaccccggcgtggtggcacatgcctgtaaacccagctactcagggggctgaggcaggagaaccgcttgaacccaggaggcggaggttgcggtgagccgagattgtgccattgtactccagcctgggcgacagagcgagactccatctcaaaaaaaaaaaaaaaaaaaaaaaaagcagcatcaacagccttctctgataccagcttcaccctccctgcccgggcccagaacactttctgggcatggagcttgctgccggggacgtgaggggctccagcaattccagggcccaggtcagctctgagcggcccctcccaggccttgccttgctccgagtctcacgttcagtggcgtcgtcgagaagaaccgtcttgcctgttgctatgcacagcgtgccaggacgggcaccacactgatgcctgacgggcaggagcccggcgtctccagacgctcccatctggggcacgcagcccaaccccaaccggccacggaaggcaggacaccgcgggtgagagcctgcgctgaggctgagtggccggggtctgaacgtcgcccctcggctaagccactcacgtgacttcatctgagtcactctctgagcctcattcctcatatataaaaacagtctgggccaggcacgggggctcccgcctgtaatccagcactgtgggaggcggaggcaggtggatccactgaagccagaagttcaacatcagcctgcgcaacataacgaaacctcgtctttacaaaaaatacaaaaattagccaggcatgttggtacatgcctgtagacccagctacttgggaggctgaggtgggaggattgcttgagcctgggagatggaggctgcagtgagccgagatggtgccactgcactccagcctgggcgagagagtgagactcccacaaaaaaaaaaaaaaaaaaaattaaaaatgtaaaacaaaattcaaaacacatttaggcctggcgcagtgactcacgcctgtaatctcagcactttgggaagctgaggcgggtggatcacctgaggtcaggagttcaagaccagcctggctaacacggtgaaaccccgtctctactaaaaatacaaaaaattagctgggcgaggtggcgggcgcctgtagtcccagctactcgggaggctgaggcaggagaatggcgtgaaccccagggggcggagcctgcagtgagccaagattgcgccactgcactccagcctgggcgacagcgagactccgtctcaaaaaaaaaaaaaaaaaaatacaaaacttggccgggcgtggtggcgggcacctgtaatcccagctactcaggaggctgaggcaggagaatcgcttgaacccgggaggcggaggctgcagcgagccgagatcgcgccattgcactccagcctgggcgacacagcaagactctgtctcaaaacaacaacagcaaacaaaaacaaaagaacccaaacaaataaataaataaacagtgtgaataacagcaccttgtaagtgtcacctcagttgcgtcacaggctaagaatgatgcctcgtacagtacgtgttcaaaacatatcgtcacagaactgtgcttgaacaccccgcggcttcccactgcattcggattaaaggccctgtcctgaaccgcagggccccacgtcgcctggccgccgtcccctgaccccacgtaacgccccacactgtccccctctgcctctgagcacacctgcctcggggtgtggaccttgccggttctttggcctggaatgcactgcccccaggttttttatggctgaattcttcttgtcatttaaatcttcgttcaaaagtgatcctctcaagccaggcatccccccgtcactctctactgcgttacccagttgtgtttatttttttcacagcactcatctgaccggcaaggatctcatttgttgacggactcctcctgcagacagggtctcgtctgtctcgggcgcctctgtgtccctagttcctgcaggcctggcacgtggaaggtgctccggcaatactcacaggccagaggaaccaactggggcatgggggaaggaggtgacaatggctccccgccggggctgcttcaggacagggctcaagaagccctgtgttcccactaaaccccctgctcccgtgtccactgaatggctggcattggcccaggtgcagccctgtgacagactctcccagggtgctcagggtttaaggtttaggactaggaatcttgagacatggccaagatcatcacatgaactggattccaggagatcatcctgttcagctccttcattgagctgataccagagaaccagagaggcaaagggatgtactcgcgggcacacagcagttaagtagcagactgagacgagaaaaatgggaaaccttgactcccaccggcctggcgccctgtcttctctggcaccttgtgccacatgagcctgaggggctggggaccccggaggcctccccgagcacagccacggcatccaggcatcggatgggaagggcgctgtggatgtcacggctctggctgtgccggtcatcggtaccagccccggctggggtcacggtccagaaaggagatccctccagatttcggctcaggagctggttccgctgtcttgaagcgggactggggaagtctctgtggggatcctggggcctcctggcctctctacagaagcccaggaccagctccacgggcccctcccgcctctccagggcccatcctggagggccaagggtctacggctcactggacccaggactgacgctgcgtttctccccagggtggggcaggcaggtcacaggcgcaggggactgtctgttcctcgaaggtgctggggggccgtcaggacacaaacatcttcctgccccagcatgagttcacaggggaaacgaggtcaaagaacagcacctgctgaccagttcccaaccacctgggcagtgagcgaggccactcagcagagggccaggcctctccagcaccagcgccctgtggccaacacctggcagctcccccagactcacacctgcaggcttgggggcgcttccaaaatgcctggggcagctcccccagactcacacctgcaggcttgggggctccttccaaaatgcctggggcagctcccccagactcacacctgcaggcttgggggctccttccaaaatgcctggggcagctcccccagccacacctgcaggcttgggggctccttccaaaatgtctggggcctcattgcctctgggtactacagcaacactgggctcaggcagctttggcctttgaggaacccccttgattggcaggttctcctctccctggtccagagccatccaaaagctggggcaccgcgcccagcaccgctggctggccaagccgtctgtggcctgcagggaggccggggaggaccagcgcccttctaccctccctaggtaccaagaagcggcaccttgccaagttcactcagagcagggttcccgccttgatgtctgcagccccctctgaagtcgcacacagtgtgtgcatggggtggctctgtgtctgagtggcctccagaaccttcatcagattctcagagtccagggttcccgctctgcggactcaagcaagcctcttgggagctggcctggcagagagatcagagagtactcatgaggccccagcagtgaggtctgcccactcggcaggtgggtaagtgctgtggaaaagagggagggtcgcccgaccccactgccaacctgtcagccagcctggccgcagtcaggacccacacataggcccaggaagaggtgggctggtgtaggggcctccagctctcgggggaggcagcactgtagtcccctgtctgtggctgaggggtcgctatgggggtgtgtgtgaacagagaagacgcacgatgaagctttcttcccaccgggaaacaaggaagggcggtgggcagccgggccaggccagacttctattgcagaaggctgcgagatctttcctgacgcccagactggattataaaataaagtagacgagcccaagacatatctgtatcttgtacccagcacctgtgtaccctcgatggccaagtgagtggtagagtgaacctctggggtgtgcacgtggtctgcacacctggtaccatcaagaaggaataaacgacaggctctgtgaggggtggggttgtcctgcggtggcgatcaagctgacaaagaaagggaccctttcctccccccaccccaagaccgagtctcgctctgttgcccaggctggagtgcagtggcatgatctcggctcactgcaacctccacctcccaggttcaagcgatgctcctgcctcagcctccctagcagctgggattacaggtgcccgccaccatgcccggctattttttttttttttgtatttttagtagacacggggtttcaccatgttggccaggctggtctcgaacgcctgacctcaggtgatccacccgcctctgcctcccaaagtgctgggatgacaggcgtgagccaccacacttggctaatttttgcattgttagttgagacggggcttctccatgttggccaggctggtcttggactcctgacatcaggtgatccaagaaagggaccttcttctaagaccatcatgagcctgaagcttccccgaatggcccaagaggggctctccaccccgcccttcctcaggtaacacctctgatcctctctgaagcaaaggcagcagctcccatcacagaacacgggactcaccgtgggggtcagcagtgccggtgtccagcttaagaggagctctttggaagtaggggattctcagacccacatggctgtgcttcagggcagagacaaggtcacctgaagctgcactcaatctccttacaccctgccggctcagcctgagtccccaccgccggccagcatctggcctggtctgggtcaggagcgtcttggacttggttgctctataagggcctcaacttccccgacagacaaatgcttctggaccggcctcccttcaggccctcttagcctcctcacggctcccacaaggggatgctgcgggggcagggtgggggggttcctccttcagccccttcccctccaaagctcaagcgagaatctagaattcagccccttcccatccaaagctcaaccaagaatctagaagagggaaggatgggagggagaggaaggcaccgggcctggtctacttgagtgtgatttgaggcaaaaaaaaaaaaaaacaaacagggaaaaggaaagaaaagtagaaacgcgaagttcaataccgagagccctggctgaacccacaaacccagatgccacgtgtctcccagctaaacactcgcacaaaaagctgactgccaagtcaggggctggaatgaggctttggcccctgaactctcctccggtgacaagaacagcccaaccacagggacccccgctggtacccaaaggatcctccgtgagtgtccctgcctcctctcccccagaaaccagaggccctgcactatttaaaggctcagttctgatcatgagacctttccatctgaacagattgtttaatcccagccctggatgagtcacgccccgcctccagcctttaatgaaccttcaggtcagtggaagcaggagggccaccggtgtttctcgcacccacagcatcactcagggcaaagttaacgaggagttaatgaggcaatccctcctgccagtctgggcagtaccaggcacccttcccttaccccaccgaaacgaaactgcctagtcccagcccctcggcccaactgtgaagctcctgcaggaaaatgccaggttaatgtggctgaggatagaaagcaagaggcctggccctttgactctgctgctcacccgctggcctgcgcacagtgaggtgggaagcacagggcagacgtccctccgtccaccacagcgctgacccgtgtccacgacacggacacactgtggcagacgtccctccgtccaccacagcgctgacccctgcgtccacgacacggacacactgtggcagacgtccctccgtccgccacagcgctgacccctgcgtccacgacacggacacactgtggcacacagcacacgttaggggatggaatcgctcgtcacacagagcagcccagggccggggccaccctgagctgcactgacgccaactgctcagcagctcaatagcccggcgtctgcctggccaccacccctgcccagagatccccatcagacacggagccaccaggcactgccagaggcaaacccagctaaggaattcttgaaggggcttctcagttctgccggccacaaatgcatagggaaagaactgaaagtctgggacctcaggtttaaaagttgccccctgcccaccaggcacctcctcaaaggggcaggtaaactggaagcgccctgtttggctggcgctggacccggaacctgccaggtcagtttcttgccaaccctgacgtttggggatggatggtgagctctgggctggtgcctgctggcctcagcaggggctggggaggggatgagtccacgctgccgggcacagacagctgcctcagcacagaggggctctggcagcagctggggccagcagggctctgctagcccagtccccagggaggctgaaggtgacacaggggccagtgcagtacagctcaagttgctgccctgcccagcactttccagggctgatgtcacctctgggaggtcaagtatgccccatggcaggagctgaaacaaaacgaggggccagtgagcccaagatcacttcgtcctggctgatgccaggagcctcaatgccggctggcagtaagagcctgcagagaggtcctgtgagcctcaggaggagctgcagatccccaccacggactggccaaggcctcccttgttgctctcttgatggatgggcccagccctggccagccggactggcactctgagacagctaactcggacagttgatttgatctgcagagttatcgagcacttcctgtgcgctgggcgctgggtctggctcttcctcacgtgcctgatgccagggccccaagccagccccgaggcagcctgcccagctgcaggacagtcggcttctatctcagattttaatcccaactcaggtctggggctgcaggggcaccggcggtctgccctggcacatggacggaacgcctggtgcccggcgggcactgggcccacagtcagatgggtggtccctgaagggaagcctcgagcccccagacccggcagcatctcccctccccacaatcctgcacagagaaacctcacacggcagacggtgctgcggtcggcgcccctcagcaaaggggcagccagcaaggcccgctggatgcagggatcaggtagaggctgaacagggcggcaagacatagacccagaggcaggcgtctccccgtgcgctgtttgcactcccggagtggaaagcagggtccacctgccgagaagaaacctcccttctcccgaggcaggggcagatgcccgagcgccagggtccgggtgggggcggccccagcgttcgccatcaagttcaagccacttagagggacgcgcacagaccccagctctgtcccgggactccacggagggggcgggagcgggaccccatcagcccccgcagcccccgcagccccccgagccccgcagcgcccccgagcccccaccccccggaacctccagcccccgcgggcaccttgtttcggagcagcttgttgcgcacgcggccccagagccgggcgccggtgttgggggggcgcttgctccccgactcctccagcgccaggggttcgcgccccgccttcgggctgcagtcgggctggggcaggacgtcggtcatgccgggggggacgggacgcggcgctggagagaaggcgcctgtggagcgctcagtcccggctgccagtcccgctagttccctagtcccgccggctttccccgcgctcgcctccctccctccctccctccccgcgctcccctccctccctccctccgtccgcgtccctcctccctcctccctcctccgcatccctccttccccgccctccgcgaggctgcagcccaggctgagcgccgcctcccaggcccagggccgcccctccaagccccaaccccgggtttcatccctggcaagggcgctgctcctccccgaccccgccgccctccctcgcaataaagtttacaccagccccacaccccagtccctccctgctgggtccccgtgttgcccaccgggctgctccaggggccaagcggaggggccgggggccaggcgggggctgcattttggccacaaacagctgccctcctccccgggcaaaagactctgactgccctggggtcgcacttccccacccccaacttctgccccaggcaccttcctcagagccagcttggtgacccggccagacccttgtggaccggcactcagaagcctcctcaggtgagaaatgtaaggataaaggagacccctagtgtgggaatcccagtgggaatcgggtcactgatctgctcagggacaggagcaaaagcccgaaacgacgcgggtcacacgtccagccagagatgcctcttgaggggtcactttgaaccatggccctttgcacctcaccaaaaaaggtttccgctgccaggggcagaggacgccacgggcaaccacccgcgtccgtgctgggcgcagaggacgccacgggcaaccacccgcgtccgtgctgggcgcagaggacgccacgggcaaccacccgtgtccgtgctgggcgccttgagagagagaagaacttgttcttgaccttcaatttatttagtgaactttctaaccgcagagactaggacacaaattacgtctcaaggtaacagtgcaagttagagtacggtattcagagaaaagagaaaggctgaatcccaaatgtttaactatgcaaaacccaggggtgtctggggcctcggacctctgcagaccccagcacggcacagaaaggaaaccagtatttgcaccgtggcaaccgcgaaccaggtctttcaaacgcccgactgcatgtgagcctcacattcttgtcatgttggtgttactgccctgttctagagaggtgaggacagggggtcaggaggtccagttcttgccagggttacacagtgccaagtgaggatggggaggtccctccaaagcccttggtgctcacaagcactgtgccttactcaaacatggatgatgctttggattcaggaaaaagagctgggtcaggacatttcttggttgaccccaaggcaggtgggtcggggcccagagacgagccctcggcatccggcgtcaccagccaggcaggtgtcgggatttctcctcagaggccttggtgtttttgaggaataggtggcttccctgcagagacagccgtagtcagagctgtccttcgtggaaggctggcagggaccaggcatcatggattaagtcacttacccctcccaactgtatgaagtcagtaccagcatccccgctttacctctgaggaaacgaagggctctgacaagctgagctacgtgtccaaggccaggacaagctggaacacaaacggaggtctggctaactccaaagcccacacccctgtcactcactgtgatgccctagtgtggcaggatctggccctggactatcttccacctggctggtggaggggggccttggggcgtcctgcctgggctagaaccgggcctcagtcttcactgtccctgcaggggcggccagaccagctccacttcttcctggctcacacgtcacacgcacccctggacggtgcacacggaacttcctcaaacctgagctgctaagtgggggctgagccacaacagcctcaccagcaccgcctgagggggaggtggagagacggacggaggtaggaacatgcctgtgtcccctaactgaggcctcagtcacccttctccacccctccttcgcctgccccttccagggctccaggaggacccagacagccccttcacacagccacaaagccatctcctccaggaaggctctgctcactcctcaggccccactgcttggtcccactcatgtcatttttttttttttttttttgaggcagtgtcttgctctgttgcccaggctggagtgcagtggtgcaatcttggctcactgcagcctccgcctccccagctcaagcaactctcctgcctcagccccttgagtagatgggactacacacacccaccaccacgcccggctaatttttgtatttttcgcagagacgaggtttcaccatgctggccaggctggtctcaaactcctgacctcagcctcccacagtgctgggtttacaggcatgaaccactgcacctggccccactcatgtcactctagaggtagtgactgagggcctggctgcgtgcccgaccctggggtgggggttaaggcatcacagagacgaatcaaaagtcagtgcttgacaaaggggcagccaagaaagcagagatgtccatcaacaggaggcagacaagcatttgtgcatttggcacgggtcacttgtgcacctactaggcaccacgcccagatggacaaaacccgcacaaaatcccatattacggcctcagaacaggacagacaaaatgccacgaacatcgagagatacaatttccagctggaggcaactggggaaggcttcctggaggagaggggtcagcgtggggccctcggggctgtagggaaaggccatccaccctcactgggtcccagctttactctacctccctccagcaaacgtgcaatggctgtcatgtaactggctggtaggatgccattataactgctctccacgtttgcgccacagtgctcctggtgccgtgacttaacttcagaatcggcccctcactggcctatggtccccttccctcgggctgggtcccaggccacagggtgcagactgcgagaatgcacgcccctccctgccgccgggtgtgggggagaagggggccgtgtgaatcccgttcccaaggcccggcactcatctgtcttaggtaccacaggctcaatacttgtctaggtaaagcaagctcggactggatgaacgatggccagctggtctccatggtgacataagtgccttcgcagatgggtagccgagttgggagtcttcccctgagacgctcatctttcccttcctccctatggactgggggcttcctctggggacagcgcagacttgccttctctcccccaagcccgactcattgcttcctggagtcaatggtcttgggtggaagaagatctgtgcaagacagatgtccccagcaaaagcagaagtctgaattctagtcgctgcagcccaccacggacccctcctcatctctgctgggttcagctcaggctatcccaaccacctgggaaggggccactctccttcctccctcactccttccatcccctaaacctgctcccccccaccccttccaccccctacacctgctcccccaccccttccatcccccacacctgctcccccaccccttccatcccctacacctgctccccccaccccttccatcccccacacctgttcccccaccccttccatcccccacacctgctccccccaccccttccatcccccacacctgctccccccaccctttctacccccacctgctccccccaccccttccatcccccacacctgctccccccaccccttccatcccccacacctgctccccccaccccttccatcccccacacctgccagagccctcctcagacgacctgcaagactcccccggctggataaacagagcctggtggtaaggcccccacgaacagatgtcactgcctttggaattaaaaacattcctagtggaccatcccatcctccctcagcccctccccaggctctctgcaaggggagtgagaggggctgtccccggggagacgtgggtgggaccccgcattacacctagggagggggtcatgccacccagcacagctgtgactgaggtaaaatcgggttaaggtgttcagtggcggcatcaacgaggaaaaaaggtcacatcctgccctgtgcgagcgggaggggcaaaggctgcagtggggctgcctcggtgacagctgggggtggggacggcttccaggcaaatcctccagcctgtgagcaccaggaggaaggttctgcctcagaacctagaaatgcagctgccgctttcctggagtgacctcctttttcccaccagaacgacgctcctctcccccagcccacacttgaaccccgattcctcgtcctatccgctagcgcaaatgactccaggagagggggtttctgagcagccagctagaccaaggccacaggcgccccagtggggatagcctgggagccagttggggcggggagagccccaagaggccgcccagagagtccagagcccaggaggagcctggcacccagctgaggatggggaccgaggggatgtggctcaggtctgccaagaacactccctctctcagcaccagaggatcagggcaccggctgggcatcagaggaccagagctgggggacaagaaggtgctggaggagagcagggcggacccgaggctggggggcaagaaggtgctggaggagagcagggcggacccgaggctttgggggctgcagagagcctgccagtggctcctgcccaaagacaggtgcaggctccaggatgagagagagacaagcaggccgagcatgggagcccggggtgcccagcgcccacacagggcgtgcgagttgggcgggaggatggcacgttccggggacagctgtgggggagtggggacgggagtgtcccccaactcggtggctctgtggtcactgcattcttactgtgtgttctgaccatttcctgtaccgaccctaaccaaaacctgcggactggaaggccaaatgtcttcccagaatgagacactgagactcactctaggtttttctccccacccatcggatacctctgggtatttgcaatgttcagagcctgcattcagcctggggacaggagtcacccagcagccaatggcagattagaccctaggagctatgtttgtttctttctttccttccttccatccttccttccttccatccttccttccttccatccatccacccatccatccatccatccacccatccatccacccacccacccatccttccatccatccatccatccatccacccacccacccatccatccaggtggggctgggagaggggtccagggtgggctcaaggttgaagatgggcacagtgtaaggaagaaggcagtcaggatgaaatcagttgctctacggcccagacctaggcctgcccaaggtaacctgctgtcctcccaactccccaaaggcctgtgccggctcatagggcagtcccgagtacgtgctgcttctcacacagctccagcctccctctgcctgacctccagcctctctctggccacgtcaggctggtgtcgccagggtgctcggtggttctaggtacggaggagaggctgaaacagcccaagagcttgtctgctgcaggagaagtgtcccgacagcccgtccctggcaaaccctagcgattctcacagcacatttggtcatggaaaagggtgaaaaatgcacttgagcctttgggaacatcttgcttatctagaacaaaactcacccagggacagagtgggcagggcgtggcccctcagtatgctgtccctaccgctggagcccccctgggctgcttgcctgctcctcctcccgggaaggagggggtgtggccgggtctcccagcacagccataaattgcagcctgaggcaggaggggctgaggcctgaaggtgggatggggtcgccgagcctccctgctctttcttcattctggattcccgaacacctcccttccacccaagctccgagctcatggtggccagaagcaaagccctgggagccagggacctgtggactcaacggctgtgtttttctctgggttcagtttccacagctgtcaaatcaggagctcggaacagacacatggtctccggtgagatttcttttctgctgaggacgcacccctgccgttttttccaaatgaaattttatgccgacgtctccctgcccacctcgtcggataaaagcagaagcagagagagcaggcgccctggctgaagaggggacgtggggcccactggctcacacctgcttttccaccacccctcgcctgccttggggctcacgtccctccccggaattcccacgccccacaggcagaatctgaggcacacctcagcgccccgccctcctttcaggcatctacagctcaaaccttaggttcccagcagctcctagaggcagttctcccgaaggcctcgctctccctcggggtgggggacgtgggggtctgagagattaggggctttgtaaggacacctctgggtcagacgctgaacctgcagctccagtcgtgtctctgcttctctccctcctttgggaaactcagggcttttgctcagtggctgtgggttcgccctggcagcctcgagaggggacagcacctgtctagtgggtcaggcgggtgtgtctgggtcatcttgcgtctccagccgcgctagggtctttcctgaagccagggcagctcagcacttgcctccgagggcgtgaacacggtgtgcccatccctccctgccccagcccaaagctacaggctacactggggcttagaccctcgcccagcaccaccaatgtccacgcccccaggccacggcaagggcggggctggccacgaggggctgctgtgagtctgcggtggccgcaggcttgagggaggccagcagagcccaccctaaaggtgacccccgctcagcattcatctgcagcctcagccctaactcaagaaattctctggcaacccttctgtggcatccttctcttgaagctttcagaaaacacggaaagtgggacaaccctggagctgatcctttggattcctaggaggaagcagcagcctccgccagcagggaggttagcggctcacggggaggaatctatgtctgcggctttcgcctcggcgagttcgctgaatgccacggacccgagaggacactctctgaagggtcacccgaggttggccggctaagatcaaacccaggtcccgtgcctctgagtctgggagcccggcacccagagctgagaacacctttttttggtctgtcgggaggctggatgttctcagggcctgactgcatcggctcctgaggtcctgtctggaccggcttctctgcatggtgcccacccttcagaggcgggtcagggggagcgggcgccaagcctgcctgctgaggcggcacttcccaggggtggaggggagcggggggagccgactcacacctccatctgcttcctgctggatgcttcctgcccagaatccactgggcagagtccaggctcccaaaatcaggaacacctgggcgatggaggcagctgagcagggctgacgagagaggttcgtgccccacgtttggaaaagctttcgacggcagggcaggcactctcgagggaccctcccccgacttcccccacccaggacagtctctgctgcccactctccaaggagaaccaggcgtctagacctgccttgaagagggacagcaggtgggagtctgggctggagaacaaatgtgcccgaaacagctggggtgggcagggccagagcaggacaatggctgcagtcacggggccctgggaggaagtggagagtcagcaggaagtagaaccaggcctggggctcagcctccacggtccctatgtgcctggggaactggcacaggggtgggggtggcggcagagggaagagccccacgtgggccagctgtgagggtggcaagcagcagggaggcggaactcctaagccaggagccgaggcggggcctgacatgcactcctggccttggcgggcgccgacgcgggctgatcttccagggagaggtcactccggtgtcccacgacagggagctatgggggctgtgagtgccagggcaggggttggggacgggagagatggaaccaaagggaaaggcctgtgttccttcccagttgaatcaaggcctccctcagggccaggggcccggctgtggtcagtgtggcccacgcgtgaggcctggaacggggaagcactgaggacccacgttaccggccgtcgatcatcttcctgggaggggtcccagtaccactatgaagaacgagagggggccggagctggaaggggctctgggctcacaacccagggcccccaggacgcacgcgcaggaccctcaggcagggtcgaatggggacaagacaccccttgggggtcagagggagggaagtggggcaggggagcccttgactcctgccctggcgggctccggccccacgttctctgcaagcttcctcgtgctctccagagtaattgaaaccagaagctgctccccagccgctgacaaaggccccttgtttccgaccacaccaggccaagctcagagctgccgtgctgggtcatggcagggaaacctcgggccagccggcattgagggccccagccttgacttccccgcccctgctatgaggttggttcagcaaagccagtctgaccccatcagcttaagaaaataatgctgcctcggccagccaaaggccccgacccaggggaccacttataggtgacagcctttaggagggggctgctggacaagtgacacccagaaccactggaagggggtgggggacagggtgcctgaacccgccagcttagggcaaaccacgtactgactccatgccaggccccgggtccagggtttcatggaccctcacattcagtcctcttacagcccatctgacaggtcaggaagctgaggctcagaggcaaagatactcgctctgttctcccaactaacgatggagaaagctagactcagccccgcaagatctgtctggcctcaaaaccccggcaacactggctaacgatccaagttctcgttttcctttttttgagacagagtctcgctctgtagcccaggctggagtgtaatggcgcaatctcggctcaccgcaacctccacctcctgggtcctggttcacaccattctcctgcctcagcctcccgagtagctgggattacaggagcgcaccatcacgcccggctgatttttctatttttagtagagacggcgtttcaccatgttggccaggctggtctcgaactcctgacctcatgatccgcccgcctcggcctcctaaagtgctgggattacaggcatgaaccaccgtgcctggcctaagttctcttgttttctttaccagacggtgaggtcctggtcattctttgtacccacagcccagggcctgccattcagaggatgtatcgtaaacagaaacaagtgagtgaacaggtgaaagcgtggacgcacacgtcacagcaccgactggctcttccaggtatgtgagatcctttaagccagtgctgaaggtggggtaggaatagttacccccactgaatcaataaagaaacttggccgggtgcggtggctcacgcctgtcatcccagcactttgggaggctgaggcgggtggatcacaaggtcaggagttcgagaccagcctggccaacatggcaaaaccccgtctctactaaaaatacgaaaattagctgggcatggtggcgggcgcctttaatcccagctaaccaggagactgagacaggagaatcacttgaacccgggagacggaggttgcagtgagccaagactgcgccattacactcagcctgggcgacagagagagactccatctcaaataaatataaataagtaaataaataaaagaagaaactgagatgccaagaagtcaagggaccagaggttgttcccgcggcctcagggtgactgcgtctgcattcgatgcacctaaaccactgaccaggggaggaaagagctgacccaggaagaagggtgaaggggtcaaggggcagggacacttggccgggagggggagagaaggccgaggcagggggcccaactgtgtgcttcaactacaggagactaatagtgaccagtcatgccctagggtcacgggtcctgctcatctattacagctgggaggcaggtgggggacagagcttgggtctggagagaaggaggctgtgctgtctccatcctcagggacaaggttctttttctcaacgaaaggcaagagcgttttgggtggaaacaacccaaatgtgcacggatggacggacggacagacggataaacagacatggcacctacatccacggacggacggataaacagacatggcacctacatccatgaatggatggataaacagacgtggcacctacatccgcggatggatggataaacagacgtggcagctacatccacaaacggatgaataaacagacgtggcacctacatccacgaacggatggataaacagacgtggcacctacatccacggacggatggataaatagacatggcagctacatccacagatggacaggcggataaacagacgtggcagctacatccacgggtgggtggacaaacagatatggcacctacatccacggacggatggataaacagatgtggcacctacatccatggacggatggatgggtaaacagacatggcacctacgtccacagacggatggatggacgaagagacgtggcacctacatccacggacagacagaaggacaaacagacgtggcacctacatccacagatggatggataaatagacgtggcacctacatccacggatggatggatggataaacagacatggcacctacattcacggacggatggatggataaacagatgtggcacctatatccacagacggataaacagacgtggcacctacatccacggacggacgggcagataaagagacgtggcatctacatccagggaaattgtatccagcctcagaaagggaggaaattcagacacacaacggcatatgggtgaagctcaaggacatgaggaggacaaatgctgtctgattccacctacgtaaggttcccagactggacaaattcgtacagacagaaagcaggcaggtggttactggaggctaagggtgcaggagtggggagttatgatttaatggggatggggtttcggctggggagggccaacaagttctggatatgcacactggcaacggctgcacagcaccaaatccacctatggccacggagctgtgcacccaaaaattattattttttgagatggagtctcactctattgcccaggctggagtgcagtggcatgatcttggctcactgcaacctctgcctcccaggttcaagcaattctccagcctcagtgtcccgaatagctgggactacaggcgtgcaccaccacgcccggctaattttttttaatctttgtagagatggggtctcaccatgttggccaggctggtcttgaactcctgacctcaggtgatccatctacctcggcctcccaaagtgctgggattacaggcgtgagccaccgcgcccggcccctaaaatttattaaaatggtaactttatgttatgtatatttcactacaatcttttattttttatttttttcagtggagatagactcttgctctgtcacccaggctggagtacagtagcgcaatccttagctcactctagcctccttagcctcccaagtagtccacagctacaccacgtgagctactatgcctggcttctaccactattttttctttaaaaagaataaaggccggacgcggtggctcacactcccttcctggcctggaacctgcccctcccaccacagggtcttcagcgctgctgtgcccagggaggggctgccctggcaggcacgtggggaagtggagctgcctcccaggcacagggagcagaggtggactgtggggtgggggctgtccccagcctgcggtgagcgagggaatgacgcagggccggggggcgggcagggggtgcagagggcccctcaggtttaagtagcttcttggtctcaggcccttctccagtctggggacgctggcagaaactgagctgtggggccccaagggaaagcgctctcctcaggcccagcccgccaagaagggccggaccctgggaatatgctaatcagctagcgggtaggttgcagctggagcggcaaggctggaaatagagtaggataaacacagtggagtcccctgggaccaggagccagggcagactacgccgggggcaggggcaagagccggtggagggggggctcccagctaagcggacctggatggggtccctgagtctggggcccttgttcacccactaacaagctctgtgaccgcggctgcctcgctcacccttgctggtgtccatttccttctctccggaaaacaggattggattaaacgccctctaagatttattccaggccgggtgccgtggctcaggcctgtaatcccagcactttgggaggctgaggtggacagatcacctgagctcaggagtttgagaccagcctggtcaacatggtgaaaccctgtctctactactactaataaaaatcagctgggcatggtggtgggcgcctgtaatcccagctactcgggaggctgggacaggagaatggcgtgaacctgggaggcagaggttgcagtgagccaagattgcgccattgcactccagcctgggcagcacagcaagaccccatctcaaaaaaaaaaaaaatacctcttccggccaaacccccaggaatcccctccttttattcattccttctactggccttgcttgcagctccccgccacccctgctgaggctcctgactttcctgggaccctcccttcacattcgtgcctccctgccaggcgggtctgtcctccagaactcccaccctactcccttctgcggaagcggagcctgcgcaccttgctggaataacacagagccttagcatagcaattgcgctggccgctctataccaagatttctacaaagaatataaagtacttttaacaaagtatccaaaaaggtgcttaagaagactccatacagctctagagaaaaggaggtttataataatccatgaaaacagaaaaacagacaaaacaggccctgattaaatctacataaaaatgtgtatacctcaagaagggaaaaggcacagaataaactggctgcttcggaggagccggaggaaggatggtttctgattaggtttcaagtctctttgcttctactgcaattttctttctcatacaaacattgcttttggaattaaaaaacccagggcttccaaatcgctctcgttccacctcctccttgaagcctccctaattccagcccatggtgacctttctgcctctgaattcctgcgggacaatcttccatcttcttatagcaggacaatcttccatcttcttacagcaggacaatcttccgtcttcttacagcaggacaatcttccgtcttcttacagcaggacaatcttccgtcttcttacagcaggacaatcttccgtcttcttacagcaggacaatcttccgtcttcttatagcaggaggcagcaggacatctagaaatgggctctgcagccagctgcccgccctggcccactcctgggcacatggccttgtccgggctccttagccccagcttcctcatctttctagctgtgatgatattcctctcccacagggtcctgggaagatctcctgagacagcagatggaagcatttagcaccgtgctgggctcgtcctgggctcgcttatgtgtgtacggctattgtggctgacatctagcattcttctcactggagaacatggaccaatatactcgtctttccaatctgacagtgggtccctggaggccaggaccccctcctgggctggggacctcacagacgcatgctaagtacccctcctgctgttttcttttcttttttttccccagacagaatctcattctgtcttgtccaggctggagtgcaatggagcaatctcagctcactacaacctccacctcccaggttcaagtgattctcctccctcagcctcccaagtagctgggattacaggtgcccgccatcacgcctggctaatttttgtttttttagtagacacagggtttcaccacgttgaccaggctggtttcgaactcctgacctcaggtgatccccccgccctggcctcccgaagtgctgggattacaggcacgcacgaccacccctggctaatttttatatttctagtagagacggggtttcgccatgttggccaggcgagtctcaaactcccgacctcctaatccgcccgcctcggcctcccaaagtgctgggattacaggcgtgggccccacacccagctaattcttgtatttttagtagaaacagggtttcgccatgttggccaggcgggtcttgaactcccgaccttgtaatccgcccgcctcggcctcccaaagtgctgggattatgggcgcgtgccaccacgcctggctaatttttgtatttttagtaggaaaggggttttgccatgttggccaggctggtctcgaactcctgacctcgtgatcagcccacctcggcctcctgctctttcccgcacgtgctcctctccttcctcccaggggcaccaggcacaagtgtcccctgcccagaggactccaagacaaaggacgctcaccttatgccataaagcagcacctcagctgcttctccaggccattagccatgccacggccctctgtccgggctgggggattcgttgacaaaggcctgagacgtggggacatggcacagaggagggaacatggcctttcccacataccatacgcagagatgccttggccaaggtacttaacctcagtaccccagtgtcctcatctgtaagatggggaggagggactgtcattctccctggaggatcacgacaaggatcacacgaggagatggcatttgggaagcggcctccaggagcacaagtgctggacacacattggtgacgcatgctgccgtctgtctgtcactaaatgcttcccccaccccaccccgccgctgagactcctgccccactgccccatcaggcgacccagagtgggggcctcatcacagcagcaaatgcctgcgcttaggccgtagggccccttgctttctctggatgggctgctgggagggggcttagagagaagtgggggcctcagagactgccctcctcctcctgcctttcctacaggccccctgaatatccccgagggctgggccctatctcaaagccacctccgactatgtcctcagcgcctgctggcgggcagaaagactgcattccagaggctagtgccagctcccttccttagatgtgtggccggagtgaaggcagagacaagctgtggggacagaccgttccgtggctccgtggggcccgggttcgtgggaacagctccgtgtggactcgtcacccagcctggccatccacggtggctctgagggcagtcacggggcgagactttctaagccacagcccgcccctggggcatgcctcccccaccaaaggcaggctggtgagatggttctgcagcggagggccagggccgggccttggcatgctgagtgctgggggacttcaaaggcctgcaggggactctggctctgaactgtccgctcacaggcccaggtcagctggcagcaggaaggtttatgtttcttttaatatcaactcccaggcatttaacattcctcgaagcttaaacacagaaacattttccttaccagactctgccttctgctttgccaaacataacctggcttcctccctcccccactgcctccatctgctcctgtctccaagaggcttgcagtgactgatggtgtgtttcccccggggcttgtgcagctgagtgagaaggagggaagcaatggggctgaagtccaggtgggggaatgtgccctcgggccttgggagctgagttctcgaggggctggggcccaccgtgcccacggggctggctgcccggcacatccttgtaactcttctattccacagccaccagtggcccagggagtgtggcgtggcgaccactcgtctcttgcctgggcgtctcctggggctgcacaggccagcccagaacccttccgtgcctgtccctctagcccagcccagggacagggagatggggctccctccccttatccccacagagagcaggtcccagggactgaatctctagagcccatttcctaaatcacgaaggactggctggcagttgcctggcagccctgtctccctagtgacgagtactgagaagcagggtgcagaccccacagcatcggaaagagacgtgtttaggaacacggggcgtatgcggcagaggccaggcccctccacgtggggcccctggttcaaacactggagcctgagatggggcagcgagtgggagacccacacagctccccaggggcaatgctaccaaggacctgcaggtaagagccagataccaaactcggtggccatgacaatgcatcagagaacaaatgcttcctgctaaaaagcatcgttcagctccctgttgtagacggagccatcgcagcctgcgcctggatcacctcttgggccacggtcaagaagctcggcgcccagctgcgcctggatcacgtccggggccacggtcaagaagctcggcgcccagctgcgcctggatcacgtccggggccacggtcaagaagctcggcgcccagctgccgcctggatcacctccggggccacggtcaagaagctcggcgcccagctgcgcctggatcacgtccggggccacggtcaagaagctcggcgcccagctgcgcctggatcacgtccggggccacggtcaagaagctcggcgcccagctgtgcctggatcacgtctgcggccactgtcaagaagctcagcacgcccaacgcccgaggctcaacctcagtacgggtcagttaccgtctcccttcatttcatggtcacagaatctacccccaaaccagaccacttgcggcacagcacgaggccacacgaggtaccagacgggagtgtgagcggctccaccacgtcacgccttttcccgctcccaagcctacttctcttaataggttggtgaatagcagccatcttcaaaattggcagaatgtttcagagacacaggctgcacacacagaggccttttccctatatatgtttatagggagccaaaagcacagttgaggcataaatgctgtttttatttatttttatttttttggagacacggtctgactccatcacccaggcgcgatctcagctcactgcaacctctacctcctgggttcaagcgattctcctgcctcagcctactgagtagctgggattacaggcgcccgccaccacgacctgctaatttttgtatttttagtagagatggggtttcgccatgttggccaggctggtctcgaactcctgacctcgtgatccacccacctcggcctcccaaggtgctgggattacaggcgtgagccaccgcacccagaagcataaatacccttaacccgaggtgcagcctctactaacacccagagtccccacccgaagccacagactcccaacgcagctgagtaaggtccggccaccctaacaacaagtcagagacccccctccccccaagccaaccagcaggaccctaagtctttcgggcagaagagcaaacgcctggtccgtgtgcctaactccggtcccccgtcaatggcagacacggctcctcacacacagcattcctccctcccgttcaccgacgcagcctctgagtccttctcaacatggcgttccgggaaacaaccacccatagactaaagctggcgtgtgaaaacaaagctggttgtttccatcttgcagaagcgcagatgacccacctgaggagccacgcacacgcctgggcttccggggccacaacaggcagccacctctagcagggaggggagaaccacctcctgggaactttcctccaaccagcttggaaccaaaatcacgaaagagcaggctccttgaccagaattccttttcaactggaaccacctcctggaggctccctcagcctcgccccggcgccctggcctcacctggatctgtcctttgcccatgatcttgtccacgatctcattgttgtccttgttgaccttggtcttgtcatagcacttctcatagcacaggatcctcagggactgggagccctccagctcgatctcaaactcctggggaaagatgggacaaagggccctgaacctccgaagctgggaggcctggctttccggcaggtgcgtgcctcagctttgcaaggaggagggagtaagcacggcccacgaaggacacgtcagattttctggagctcccagaggcctcccatcacccctggagtctgggggcctgagctgacaccacagggtctgacacccagacacacaccgcgatcagaagccagaggagcagggagcagaaaggggggtgcagacatagctggtccaaccaatgggctggccgtccccagcagacaagccacgagcacggggtggtggggtccccacagagatgccagcccctgccactcacctcatcccacttgggctccgctgtgtcccggaacaccctggttttggctttgctgacaaaatagccgaaggaatccacctccagggtacagtacaggtctgtgggggaaggacagacggagatactgagtgagtggggccagggtggggcagctggggcggcactcaggatggagggggacatcgcatctgtcctttccaacgtccccacggatggcatcttggctctctcctccctgaagcccgggaccatctggcttctcccctgcccccttcttaggggctcagccctccccacctcggctcaccccacactctgcccttcctacctcagccctccccacactctgcccttcccacctcggccctccccacactctgcccttcccacctcggccctccccacactctggcctcctcctccctctaaagggcccttgactgttccgtctccacatcttcctcaccatggagacgacaccacaaactcttcactgaccgccctggagccacctctccccgtaacatgggtgcccaggcctcaacagcggcatttggggtgggaggcgtttagcagccctgcctctgggtcctgaatgctcggagcatcccctgccgcggtgacgaccaacaacgcccacatccccaagcccagggtgctgtggtttcctccgctgcacttaacataaaccaaagggatcttctctactcgtgcgtccctagtctctctccccccacgacgtaaacaccatgtggagagaagcctgggttttcctgcctgccggtgtacccgcagtaccaagaacagggctgggaacccagctggcacacggtgaacgaggctcccaccaccaccaagcgctccaggtaacaaggcagtggagggctggggcgggagggcagggccgggggctttccccggcatttccatcttccaccctggccttcaggctgaaaatctaccttgggacccaactgctgaggccacagcaccggcacggaccccaggccctctgcaaacccacacccgccctgggctcggaccccagcagtcctcccacctccagggagatgccgaggttgttcccagggtaccagaggtggtgtgggaggtgcctttgggacactatggccaaccctctgcagcgtgaaacaacgtcagaggtcacagtgcgggcatacagtgcaggtggcttactccacttagcccctgcagctgcccagctgggccattctccatcagaacagctttcctggccgggcaaggtggctcacgcctgtaaatcccagcactttgggaggccaaggtgggcagatcacctgaggtcaggagtttgagaccagcctgaccaacatggtgaaaccccatctctactaaaaatacaaaagtgagcccggcgtggtggcacatgcctgtagtcccagctactcgggaggctgaggcaggacaatcgcttgaacctggggtgtggaagttgcagtgagctgagatggcaccactgcactccagcctgggcgaccaagtgactctttctcaaaaaaaaaaaaaccaaaaaaaccagctttcctgcagaaaggacagtgcagctaccccaagaagcctccagctggagcaacagaaagaagacccaggtgggcctcagaacacacagaacggggctggggatttgcaggtgaacaacacagaggccctgagcaccccagcctgggccagaccagggagtgggcctgtgtgtttgagacgggccatgaagtgctgtcatcatggattgatctcggtgtgagcccctcctcgaggggctggggagggctcacagggtcagagggagggttccggaaggggctgggggagggctcacagggtcagagggagggttccggaaggggctgggggagggttcacagggtcagagggagggttccggaaggggctgggggagggctcacagggtcagagggagggttccggaaggggctgggggagggttcacagggtcagagggagggtgccggaaggggctgggggaggggtcacagggtcagagggagggttccggaaggggctgggggaggggtcacagggtcagagggagggttccggaaggggctgggggaggggtcacagggtcagagggagggttccggaaggggctgggggagggttcacagggtcagagggagggttccggaaggggctgggggacggctcacagggtcagagggagggttccggaaggggctgggggagggttcacagggtcagagggagggttccggaaggggctgggggagggttcacagggtcagagggagggttccggaaggggctgggggaggggtcacagggtcagagggagggttcaggaaggggctgggggagggctcacagggtcagagggagggttccggaaggggctgggggaggggtcacagggtcagagcgagggttccggaaggggctgggggagggctcacagggtcagagggagggttccggaaggggctgggggagggttcacagggtcagagggagggttccggaaggggctgggggaggggtcacagggtcagagggagggttccggaaggggctgggggaggggtcacagggtcagagggagggttccggaaggggctgggggaggggtcacagggtcagagggagggttccggaaggggctgggggagggctcacagggtcagagggagggttccggaaggggctgggggagggttcacagggtcagagggagggttccggaaggggctgggggagggttcacagggtcagagggagggttcgagaaggggctgggggagggctcacagggtcagagggagggttccggaacgggctgggggagggttcacagggtcagagggagggttccggaaggagctggggacggctcacagggtcagagcgagggttccggagtcagaccatctgggtccacaccccagctctgcacagatcacctcccttctctccccaggttcctgtctgcacagcaggaaaagtcatggtgcctacaccctgggcctgcctgtccagaggtcctgagtttaccacggctgaagacacagggcctcacctctgagtgagaacagacatatgagtgggtcaggggtggcggcggcgaagggagtgaggataatctgggggtaaagagagattttggagcagctcagccggctctgacacccgcccaggctgggaggccacgggtcggctccctgaggcgaggacctcccggccaacgggaagcaggagagggaggggcggcatctggggacatggagtggtggcgcctggtccagacatgggtgggacagtgcttcagagctcactagccagaagctcctcagcggcagcccccaagaagggaggtctgtgggtctggagagagttcaggaagcttccacggtaacaagcagcctgagggaccgtgtggtgttcccggccagacatcgagaagtgcccaaaaggttagagctccggctctggtgccggaagacgtggattctgctgcaccacctgctactgtgtgactccaggaaggaaccttgagcccctccgagcctcggcgtcctcgtgtgtaaaacagggatggtttccgtgacctcggcgggatgccggaggctcagagcggaccgtgagactgagaggctctgaacacgccacaggctttgcacatgtgagtacgtccacacgccagccatgttctcaccttctccaggtgcacggtaggtgctgtgtaaattaacgacttcattccacatttctgagctcccatgcatcccagggtaaaggagacctggttcccgccctcagagaactcacagtgggagacgcaaattgttaagtgacaaaacagcatgacaggtgccataaccagcttgccctgagcaggatgggggcacaaggaacctcaggggatgggggcacaaggaacctcaaagggatggggatacaaggaacctcaggggatgggggcacaaagaacctgaggggacgggggcacaaagaacctgaggggatgggggcacaaggaacctgaggggatgggggcacaaggaacctcaggggatgtgggcacaaggaacctcaggggatgggggcacaaggaacctgaggggatgggggcacaaggaacctcaggggatgggggcacaaggaacctgaggggatgggggcacaaggaacctgaggggatgtgggcacaaagaagggacaaagaagggaggccagtttgcccccaggaactcagggaggcttcctgggaaaggctgctctaacggcccggggagtcacctctgtgtggggcgctgcagggaggggtgagggcagaccccacctgccagtgaagagcagggagtgggaggggcaggtggagagggagagagtcagggtttctgatcctctgtgatgttaagtcttttctcctctctgtgactcggttacctcctctggcaaatgggtagaaactattagctgtctaactgactcacagattcccgtgtggataacaggtagataaaaagcgcaaccaggccgggcgcagcagctcacgcctgtaatctcagcactttgggaggctgaggtgggaggatggcttgagcccaggagttcaagaccagcctggccaacatggggagaacctgtctctaaaaaaaaattttttaaaaattaaaaagtgcaatcctactttgtgagacactaaaaacagatttagtatgaggaacccacaagggggaaggggagaaaaagcgatgagcgtggcagcacaccagcgttgcacacacacgatcatatcccagcctgctctcgggtcaaaattcacaagcgtgactgccttttagtggaggcccagagaggttaagaaacttgcccaaggtcacacagcttgtcatgggcagatatgaagttggagtccacgtgtttgtcgccctcagatatgaagttggagtccacgtgtttgtcgcactcggtttcttttttttttttttgagacggattctcgctctgtcgcccagggtggagtgcaatgccatgatctcagctcacagcaacctccgcctcccgggttcaagggattctctggcctcagcctcccaagtagctgggactacaggcgtccaccgccatgcccacgctaattttagtatttttagtagagacggggtttcaccatgttggcccggatggtctcgaactcctgacctcgtgatccgcccgcctgggcctcccaaagtgctgggattacaggggtgagccaccgcgcccggcccctaggtttcagacagcttcagggagggcttgagaaagaggactttggagacaaaggccaggggtgacctccctgccaagaggagctggtttctggcctccaggggaatgccccatgtctaaaggcgtgctggcagggccccatcctgggcagagcagtgcagaatccacaatggcccacccaacctcgtcctggccagggcacttactggctgattgcttaaatcccttggcagagtggacgatgacatgaaggaagccatagagtcctggagactcatcgtctgcaagagagaaaagcccccagggcagagggtggtcagcggatcccctcagcctccaccccaggccggcgggaggcagacggggtatgagactcagctgagtcttggtccaacatcaccacctggtggccagatgaaaaagtttccgaaggccacggcggccttatatgtgagctgcccggggtagggctagggggtccttctctcctccactcagcctgggggggtccagcacacccaccatcctggcccagggacttagtaccattccccatgggtactgtctctccctccaaatcctgcctatcctggcactgaaaactgaccaatatgataaatcattctgctaatgatttatgtcgaggaaagcttgccttcaggaccccgttcacaaagtggaccctttcccagcacacaggcagctagaatacacccactccggtcagttcccagccctgatcacagctccccactgctcaaaacccccccagactcccgggcttacagcatgaattccaaactcccttgcttgggattcaaggcctttcaagagctggtccctggaaacttccagcctcatttcccatacaccattttatctaccgggtctgctctctcatgaatatattaacagcacaatctcagtgcaccagggtgccagttctcccaagccagacagaggggcccaaggaaaagctggggtcatctgggaactcagtagacagtcacccctacccaagctgtgtcctggccactcaacagtctcagcacagccgagcagggatcagccatttacagccacatgtctgtctgagtccttacgggaagccggccacgctctgagggctgggacctgccggttgggccacctctggttcccgagcttaccgtctttattgctggtgacaggaatgttgtgtacagtcctaagcttgaaacaggatcctgtgagcacctggagctccactgagctcaggacaaaggcctggagatctggagggagagccgagagagaagggagcgtgggcactggtccaccaggaccggctgctcttccctgggggctgctgcaggaagacggcttaatccctggggcagacttggtccttgcgagggagggggaaggatttgtggacacagcaggactggtgtagatgctgcgagaggggtcagagtaggagaatctaactgaagaggtttgtgtgtgtgtgtgtgtgtgtgtgtgtgtgtgtgtgtgtgtgtgtgtgtgtgtgtgtggtgtatgcgttttgttttcgttttttttttaaacggagtctcactctgtcgcccaggctggagtgcagtgctgtgatctcagctcactgcaacctccgcctctcaggttcaagggattctcctgcttcagcctcctgagtagctgggattacaggtgcccaccaccacacctggctaatttttgtgtttttagtagagacggggtttcaccacgttgcccaggctgatctcaaactcctgactgggattacaggcgtaagccaccgtacccagcctctgtgtatgtgtgtatgtgtgtgtgtgtgtgtgtgtgtgtgtctctgtgtgtgtgtgtgtgagagagagagagaggtagagagagagagaaagcccaggctgggctctgggtccagtcccaggactaaatcatcatgtctttcagccaatcagttagattctttgggtctcaattaatccgtaacatccttaaacgctcaccctggcacctctgagggtgactgcgagggccaaagacgtgatactggacatgaaacgcttagaaatacaaaaggcccatcaatgccacggacatcattggggagcgtggaagaggcaggaatttacccttcttctgtagtttctgaattgcttctctccactctgacctctcgtagtccgaggacagtaggaacaggtaactctgaagagaggagataagcataaagtgggtgaccacagtcaggcaaagcgtactcccagatcctggggaccccaacaaagctccttttatcttttttttttttttttttttgagacagagtctcgctcttgttgcccaggctctagtgcaatggcaaaatctcggctcactgcaacctccacctcccgggttcacgccaatctcctgcctcagcctcctgagtagctgggattacaggtgcccaccaccacgcccggctaatttttgtgtttttagtagagacagagttttgccatgttggccaggctggtctcaaactcttgacctcaggtgattcgcctgcctcagcctcccaaagtgctgggatgacaggcatgagccactgtgcccggcccaaagctcctccttatccaggcacagctgaccttgcaggaggaggcagctgggggtgggtgggtgaagggggagctccttcctgggaagccaaggtgacaggagcggctgtgccagggacggccagcagagggcactcattccacacgagaggggagagcgagtcaacagctggagccatggcagcctcctcaggaagagggggcctgagtttccggttcgtacaggtcagggccaggagccacagagtgggctgctctggactaaggaaggggctgtcttggtcccacccccacccatcctgacctttccattccgattgtggatcctgaacgggattgtgggggagttgagcagcagcaggaactcattctcaaacatcttcttcttcaggcgctcgatggcccggctctggcctttgttggctttctgcaggagatggggacacagagggttcccctcacactcgggcctttctcacgagcagcactaagcacgacactccactgtgtgttaacatgctctttacattttccgtatttcgtgatgttttgacatcttgtggcaggagaggcgggtagctgggtgagaaactgctcccccacagggctcactaattcctaagcctgtcagtgatgccctatgagcacagctttcatacacacacccactgatccagagcccatgtccccaaccaccttctctacctgacgctcactcgccaagccagcatctcctctgccccacgtcacccagggccagggaccaggtcaccagagaccactcctctagcccagggctgccgacataacggaagccagctggtgccaagccctttccctgccctgtttctccacagaaaagctgtggccacactttctttccattcctgcctcctgttcaaagctggcacctctccacgtggccctgggcggggtgctatgcctccttctcttgagaaccctaaataatacaaatattacagtagtattaacctctctgtactgtcactctgctgcctctacacattaaatcctgggtacaacagagacacctgcttaaagaaacctcagacacctttcagcctgaagccccacctgctagcctggcaccaaggcccccatggcagggttccagcctccctgcccggcagacaacccaccaggtcccgtcggctcagcctccccctctcaccagacattcatcctctgcgggcagagcctgctccctcaatgttccaagtttctgtctgtttcgtaaaggaccccctcccttttattaaccaccattatgcttcaagtctcagctcccaaggccatcctcaagctcctcagttagaattcacctctatggtgttttgttctttttaacccactggactggcaaaattgtaaagaatgttcacagccagtgttgtgacactgtgggggacagtcaccctcacacaccgcagggggaatgccaccagtcacagctttttcagaggtaaaagcctgtcaattaagcgcacactcaccctgccctgcccatcccacctggagggaacctactgcagaggcacctgcgcagtgatgtttactgttgacttgcctgctaagagcgaagaatcagagacaatccaaacacccaaaaacatttgtatgcagccaagcgacagagcaggaggcagttgttaaaaagaatctgatactgccaggcgcggtggctcacgcctgtaatcccagcactttgggaggccgaggtgggcggatcgtttgaggtcaggagttcgagaccaccctggccaacgtggtgaaactccgtctctactaaaaatgcaaaaactaccgggcgtggtggcgggcgcctgtaatcccagctactcgggaggctgaggcacgagaatcgcttgaacccgggaggtggaagttccagtgagcccaaatctcaccagtgcactccagcctgggtgacagagcgagactctacctcaaaaagaaagaaaaagaatctgatacatccaaagggctcaaagacccactgtggagtaaaatgctgaagttgcaaaacagcacgtgtagtctagtctcattggacacgcgggcgcacaccagcataagcaaagaagagttcagaagaatacacctcaaactgtcagcagtgggaggtgagtggcgaccagctttaccctgtacatgctggtactacgagcatttctcattaaaaccagccagtattatattggggattagaaaaaacatgaaaatttaaaaaattattatcaagagaacaaggctgagcacggtggctcacacctgtcatcccagcactttgggaggccggggcgggtggatcatgaggtcaggagtttgagaccagcctggctaacacggtgaaaccccgtctctactaaaaatacaaaaaattagccaggcgtggtggcggacgcctttattcccagctactcaggaggctgaggtagaagaattgcttgaacccgggaggtggaggttgcagtgagccgagattgtgccactgcactccagcctgggcgacagtgacaaagtgagactccatctcaaaaaaaaacaaaaaacaaaaaacaaatcactgcttcttctgtgactcagaggacggcacctgtgcctctccagtgactcacatgtaccacactctgtggtcagcaaggggcgtgtctgcttcctccactggacagggatatacatgaggcacccggcacaccccaggcagcacagccagtggggctcactgagtgttgactgttgactcgactgggcacaaggccacgtctgcacagctggggcaacggggaggcagcaagcctcccaggggcgggtgggaaacaggcacgcaggatgctcctgggcgggcactgtgggcagggcccagccgttcaggagggggacagctgtgctggcgaggaagccctctgggcagatgtaccaccagttggaccctctgtcctaggacatcccccagccctgaacactcctggggctgtaatggtgatcttgctttcccctgttcaaagggagatgcttgagttgaaaggatcctcagagaggccatctggttatgttttcttcaataattgtttgtttactaagtgcctttttttttttgagatggagtcccactcactctgttgcccaggctggagtgcagtggcgtgatctcggctcactgcaacctccacctcccgggttcacacaattcttttgcctcagcctcccatgtggctgggattacaggcacccaccaccacacccggctaacttttgtatttttcatagagacggggcttcatgatgttggccaggctggtcttgaactcctggcctcaagtgacccacccgtctcagcctcccaaagtactgggattaccggtgtaaaccaccatgctgggccctaaccacctgttttctacgtgtcgaatatgaggaacatggaacagaagaaaatagcgctgtccctggagttcaaattccagtggggaagagaggagtctgacaatgcaattacaattcagtaccatttaagcaaagccacaggtgaacaaaaagccacaggatctggggacagggcacccaaccaagactgtggtgggcgtgggtgtcagagaagcttcccaggggtggtgaggcctaagctgaacctgagaggtgaggaaaacagaccaagctgaccaaaccgctccaggcccttcctccactcacagggatgctcctcccgtggtgccttcctctagacactgttgttacgtgaactgagggctatgcatgttcctctagacgctgctgttatgtgaactgagggctatgcatgttcctctagacactgttgttatgtgaactgagggctatgcatgttcctccagacactgttgttatgtgaactgagggctatgcatgttcctctagacgctgctgttatgtgaactgagggctatgcatgttcctctagacactgttgttacgtgaactgagggctatgcatgttcctctagcactgctgttacgtgaactgagggctatgcatgttcctccagacactgttgttatgtgaactgagggatatgcatgttcctctagacactgttgttatgtgaactgagggctatgcatgttcctctagacactgttatgtgaactgagggttatgcatgttcctctagacactgttgttatgtgaactgagggctatgcatgttcctctagacactgttgttatgtgaactgagggctatacatgttcctctagacactgctattatgtgaactgagggctatgcatgttcctctagacactgttgttacgtgaactgagggctatgcatgttcctctagacgctgttgttatgtgaactgagggctatgcatgttcctctagacactgttgttatgtgaactgagggctatgcatgttcctctagacactgttatgtgaactgagggctatgcatgttcctctagatgctgttgttacgtgaactgagggctatgcatgttcctctagatgctgctgttatgtgaactgagggctatgcatgttcctctagacactgttgttatgtgaactgagggctatgcatgttcctctagacgctgttgttatgtgaactgagggctatgcatgttcctctagacactgctgttatgtgaactgagggctatgcatgttcctctagacactgttgttatgtgaactgagggctatgcatgttcctctagcactgctgttacgtgaactgagggctatgcatgttcctctagacactgttgttacgtgaactgagggctatacatgttcctctagacactgctgttacgtgaactgagggctatgcatgttcctctagacactgctgttacgtgaactgagggctatgcatgttcctctagacactgttgttacgtgaactgagggctatacatgttcctctagacactgctgttacgtgaactgagggctatgcatgttcctctagacactgttgttacgtgaactgagggctatgcatgttcctctagacgctgttgttatgtgaactgagggctatgcatgttcctctagacactgttgttatgtgaactgagggctatgcatgttcctctagacactgttatgtgaactgagggctatgcatgttgctctagacactgttgttacgtgaactgagggctatgcatgttcctctagacgctgctgttatgtgaactgagggctatgcatgttcctctagacactgttgttatgtgaactgagggctatgcatgttcctccagacactgttgttatgtgaactgagggctatgcatgttcctctagacactgctgttatgtgaactgagggctatgcatgttcctctagacactgttgttacgtgaactgagggctatgcatgttcctctagcactgctgttacgtgaactgagggctatgcatgttcctccagacactgttgttatgtgaactgagggctatgcatgttcctctagacactgttgttatgtgaactgagggctatgcatgttcctctagacactgttatgtgaactgagggttatgcatgttcctctagacactgttgttatgtgaactgagggctatgcatgttcctctagacactgttgttacgtgaactgagggctatacatgttcctctagacactgttgttatgtgaactgagggctatgcatgttcctctagacactgttatgtgaactgagggctatgcatgttcctctagacactgttgttacgtgaactgagggctatgcatgttcctctagacgctgctgttatgtaaactgagggctatgcatgttcctccagacactgttgttatgtgaactgagggctatgcatgttcctccagacgctgttgttatgtgaactgagggctatgcatgttcctctagacactgctgttatgtgaactgagggctatgcatgttcctctagacactgttgttatgtgaactgagggctatgcatgttcctctagcactgctgttacgtgaactgagggctatgcatgttcctctagacactgttgttatgtgaactgagggctatgcatgttcctctagacactgttgttatgtgaactgagggctatgcatgttcctctagacactgctgttatgtgaactgagggctatgtatgttcctctagacactgttgttatgtgaactgagggctatgcatgttcctctagacactgttgttacgtgaactgagggctatacatgttcctctagacactgctgttacgtgaactgagggctatgcatgttcctctagacactgttgttatgtgaactgagggctatgcatgttcctctagacactgttgttatgtgaactgagggctatgcatgttcctctagacactgttgttacatgaactgagggctatgcatgttcctctagacactgttgttatgtgaactgagggctatgcatgttcctctagacactgctgttatgtgaactgagggctatgcatgttcctctagacactgctgttacgtgaactgagggctatgcatgttcctctagacactgctgttacgtgaactgagggctatgcatgttcctctagacactgttgttacgtgaactgagggctatgcatgttcctctagacgctgctgttacgtgaactgagggctatgcatgttcctctagacgctgctgttacgtgaactgagggctatgcatgttcctctagacgctgttgttatgtgaactgagggctatgcatgttcctctagacactgctgttacgtgaactgagggctatgcatgttcctctagacactgctgttacgtgaactgagggctatgcatgttcctctagacactgttgttacgtgaactgagggctatgcatgttcctctagatgctgctgttacgtgaactgagggctatgcatgttcctctagacgctgctgttacgtgaactgagggctatgcatgttcctctagacgctgttgttatgtgaactgagggctatgcatgttcctctagacgctgttgttatgtgaactgagggctatgcatgttcctctagacgctgttgttatgtgaactgagggctatgcatgttcctctagacactgttgttatgtgaactgagggctattcatgttcctctaaacagcactttggctgcatccatgggtactggtatgtagtacactcatttccagacagcactaaacagtttgcagttctcattttgaattttgatttcctctttaccttgtcagtttgaactttccaaaccaatgctttttttttttttttttttttttgagacagtctcactctgttgctcaggctggagtgcagcagcggaatctcagctcaatgcaacctctgcctcccaggttcaagcaattctcctgtctcagcctcctgagtagctgggattacaggcggaagccaccacgccaggctaattttgtattttcagtagaaatggggtttcaccatgttggccaggctggtctcaaactcctgacctcaggtgacctgcctgcctgggcctcctaaagtgctgggattacaggcatgatccaccacgcctggataattttgtatttttagtagagatggatttttaccatgttggccaggctgatcttgaattcctgacctcaggcgatccaccatcctcagcctcccaaagttctgggattaaaggtgtgagccactgcacccaggctgaccaatattcttgttcacttctaattttactccactgtggtctgtgaacatgacttgtatgctatcaacttgcagaaaaattttgagatttccttagtggcctattataggataaatgtgaaggtcccaaacgtgtgtgacaagaatctcagttttctgtcagggcacaagcttctctgcatttttaagtcaagcatgttaattgtggcattcaggtcctctctctccttatttatttgcctacttgatctgtcagtttctgagaggcctcccaggtccttttccttgcacaggtcctgcttttccttacaaaagcctgctttttcttctcttgcttccctctacctccactttttttttttgtttttgacagaatctcactctattgcctagactggagtgcattggcatgttcttggctcactgcaacctccacctcccgggttcaagccattctactgcctcagcctcccgagtagctgggattacaggtgcccaccaccacactctgctaatttttgtacttttagtagagacagggttttgccatgttggccaggctggtctcgaactcctggcctcaggtgatccacctgcctcggccttccaaagtgctgggattacaggtgtgagccactgcgcctggctacttgcttcccctttctatcgtgttcaacatgcactgctttccagggcacttcccatgttagccctatgaaatcctgagcactgaccccctcgatctgcttggagctactgtagtcggggtctttcccttagtaactacacactcaaggctccctctcaaagtctcaaaccttacaacttcctgcctccacctcccccaacacagctggctcaaagggccccaggctcagataccaagctctgctcacctccttctggatttcactcttgagggcagagatcttcatcttcatgtcctccagctcatggtctgggaaggggtgcacctgggggctggcctcagactcctcgggggatggaaacaccaggtcggccagggggatgtaccacttacagtcatactgctggtgcttcctgcaaacgagccagagggagccatgagccagagggagcctggctcttccagcctcaactcttgggtccagaaccacagaaccactgacaggggttgactgagaactcgccagaagcaagaacgatccctgctcctgaggagcctgattgggaaacacacactggagtgatgaaagctgggttctggggtccgccccgcccgcagggagcaactccgccccttcaccttaccaggcttctggcccagatgactcatgttgtcaaacatcccaaaccacttaggtatcaagaagagcgaagccttcctggctgggctcacattttcctattccccaccacaatcccctccctcccttctagactatccgtgttcaatatccttcaggctagcaatggaatacaggtgttattccaaatgccacctcttatcaagagtggtcacatgggtcaacactgggtggaggattacaaagccacatccaagtctagcaagaaagtgtgccctagttgattagtgatgtctgccatggcaaaggacagcaggcagaggcatatgtgattagtaatgtctgccatcgcaaaggacgacaggcagaagcatgtgtgcttattattgccatctctgcctcagaactatctcaaacatgatctagttccagggagtcatgtcctttattattattattttttaaattatttttattttgtgagatggagttttgctcttgttcccaggctggagtgcaatggcgcgatctccactcactccaacctctgcctccagggttcaagcgattctcccacctcattctcccaagtagctgggattataggtgcctgccatcacacccagctaatttttgtactttcagtagagacggagttttgccatgttggccaggctggtctcaaactcctgacctcaggtgatccacccgccttggcctcccaaagtgctgggattacaggcataagccaccgtgcccgcccagtcatccctttattgacgttcataatcatcgatccttcccctaggacttagatttgcacttctcattctgacccttgagtgttgaggtgggcgtggggcttgctccccctgagctatacttgggggcacagccagccagggagggctgaagggagaggtaggatagcctggtggtgtaacacactggctgtggagtcccctgtgctgtacttgggggcacagccaaccagggagggctgaagggagaggcaagatagcctgatggtaaacgagtcccacagacacgggtttgaatccagactgccgcttctcagccgtgagaaggggtgtgcttggcacactgcagttgatcactaagtgtgggtggaagaatgtgtgaatgaacgcagaatgagcctctgctcaaggcacagagcagacccacactcccgggtagagagaaggaggctcaaaggagcttgcacatcagcttggggttccagtcccaccctcccgggtagagagaaggaggctcaaaggagtttgcacgtcagcttggggttccagtcccacctgtgcctctagctgtgcgagcttgggctgcttatttaccttctccaagactcctctctcatctatgattagggaacaacagtcgctactttgtggaggtgttgggaggactagaaatcatgtattcaaagcatgtgtcacggcacctggcatggcataaaccctcaataaatagtagcaggagacgtggtgaatattcacagcactgcagttagcagaaattcagagatgtctaataaaaggagaatgcttaagtagacgatggcacatctacgggtaacatcgtgcaggaaagtaaaaggatgattatgaagatgaggcagcaacagggaaaatgcttatgacacgaaacagaaacagcagagccccaaattgggcattcacagtgattacgactgtgtgaagaaacatgagaacatttaaaaacagggaaggaagcagcgcggcaggagtcggacctcatgcttcagtgggggacggggtttcctccaatggccttatattatctttataattaaaaacatgacttactttcaggaaaaaaggctatgtagtgaaattaagttaattaatatagtttttaaaaggaaaaaaccggccaggcgcggtggctcatgcctgtaatcccagcactttgggaggccgaggcgggcagatcacctgaggttgggagtttgagatcagcctggccaacatggcaaaaccccgtctctactaaaaatacaaaaattagccagacatggtggcatggtggcgtgcacctgtaatcccagctactcaggaggctgaggcaggaaaatcgcttgaacccgggaggcagaggttgcagtgagccgagatcgcaccactgcactccagcctgggcaacagagcaagaccctgtctcaaaagaaaaaaaaccaacaaagttgctgaaggctccatgggtggcagggtccggcctccctcccccgccctgtgccactggactcacacactcaccccgcagaggtcaggaccccctcccccgcccctggactcacacactcacctcgcagaggtccggaccccctcccccgcccctggactcgcacactcaccccgcagaggtcaggaccccctcccccgccccggactcgcacactcaccccgcagaggtccggaccccctcccccgccccgtgcccctggactcacacactcaccctgcagaggtcttcttcagcttggcacacagtaggacatctgtaaagaggaagacgtgccgcagcttccgggagctctctgacacttccaccaggaagccgtccttcaccagctgtcgcgtctgagggagatggcagaccccccagcctgctcagaggggaatgcggccgagggcagagcctgcacacgggggcacggccagccagggaggactggaccgagaggcggcatagcctgtcatcccttaaccaaaggtggttcaagcactgcctttggagtcacatgggcatgggtttgaatgccaacaggcttctcagctgtgatctcagacaggctccctgacctctctgaatcccagattcaccttctgttaagtgcggacagtgaggtctgcctcataaggtgactcatcgagatggtgcatgtgaaacagcacagtgcctggcacattaagtgtgtgcaacgcacggggctctccgcggctaaccctggagccccctgcccgggacgacctggtttctccaccctggggcacgaacatccccgtttgcaatccctcccgaccgcggcggcgaacttcatctagccccggctcaaccgagacccgagacccgagacccactcaggcctgtctgtgctactcctccctggcttctccagccccctggggatgagacctgggccctccagcctgggactgcagcagtgcccagaggggacctgcagccaactctaacctgggctctgggtggtttctgctccacgtgggagttccagagtttccaacccccgctcagagccggggggtcgtccccatctgtgccagcctttcctgtatgatacacggtgtgacctacatctgctgtaatacgtaggtgagcgtattcaaagtatacaattaagatgaccgaggccgggcgcagtggttcacacctgtcatcccagcaatttgggaggctgaggcgggtggatcacctgaggtcaggagtttgagaccagcctggccaacgtggcgaaaccccgtctctactaaaaatacaaaaactagccagacatggtgacgcctgcctgtaatctcagctacttgggaggatgaggcaggagaattgcttgaacccagagggtggaggctgcagtggagctgaggtcacgccattgcactccagcctggacgatggaatgagattcagtctcaaaaaaaggatgactgaaaacggagggtacgctaagccctctggagatttttcagatatccccagagtaaaacagacgacgggatccccagacgctgcacatcagcaccaggagccgcacggaatcggctctctctgcccagtggacactgtccaggcctgtccctcaccactttctccccaggagaccctgggggctcgtaaacagaccacaggagcagacaccctgtcagcctcactcgtaacggccgcctaatggcctcccctggacaggaagcctttcacccgggcccggctgccaatccacgaaggcaactgtccctctcatgcttcctggtactccccttgctgggctgtccccacccttgcatcaagaagggcccccagggaacggctgtcccacatgcaggtgcccactggacattccggcaacctggacggcctccaccacctccaacgccagcctttcctgctgtgggctccccgcaagccactgcgtgtgcaggccgagctgaagcagctccaagctcctgctcccttcgcttcctaggagaccctgacggcatcacactggccagaggcaggtgtctgcattcaagaatgaggcacccggaggccacttccccggcgtgggcctccagacagtcccaggtgaggaatccagctctgacaccagtggctgaaagactgcgtggtggacctggagagactccccagcctcaggttcttctggctcactggattgttattattatttctgagatggagtctcactctgtcacccaggctggagtgcagtggtgcgatctcggctcactgtaacctccgcctcctgggttcaagcaattctcctgcctcagcctcctgagtagctggcactacaggcatccgccaccacgcccagctaatttttgtatttttagtaaagacggggcttcaccatgttggccaggctggtctcaaacttctaactcaagtgatccacctgcctcagcctcccaaagtgctgggattacaggtgtgagccaccgtgcccggcctccctagattattatgaggattaatgagacactggacttaaacttctcagcctagggcctggaaagctgcaggtcatcagggtgaccaagggctgaaaacctctccttggctgggaatgggggatcaggattggagaggcaggaggcacccggtgccgcccgtgtgtgagagaaggggacgagggacctgccgcccgtgtgtgagagaaggggacgagggacctgccgcccgtgtgtgagagaaggggacgagggacctgccgcccgtgtgtgagagaaggggacgagggacctgccgcccgtgtgtgagagaaggggacgagggacctgccgcccgtgtgtgagagaaggggacgagggacctgatacttctcagcctgggtgaggggccgtgccgggctctgagctcacctcccccttgggcgttgtcactgcagtccggcgggggtcgatgtcctcgttgatgctggacaggaagttctgggagatgcggagggcatcctgcagcagcgggtagtcggggtggtccacaggtgtgtgcttcagcaggtcctgggaagggtgaggcggtgagttgaggggagcggctctggggcctgatgtgtggccaccggggagtgctcagtccccatccaaagggtgggcactcagggacctgcctaattcccgcaaaatctgaactacaaatcagagtcaggccgggcacggcggctcatgcctgaaatcccagcactttgggaggccgaggcgggggatctcttgaggtcagaagttcgagaccagcctgggcaacgtggtgaaaccccatctctagtaaaaatataaaaattagctgggcgtggtggcgggcgcctgtagtcccagctactcgggaggctgaggcaggagaattgcttgaacccaggaggcagaggttgcagtgagccgagatcgcaccactgcactccagcctgggtgacagagtgagactccgcctcaaaaaaaaaaaaaaaaaaaaaaaatcagagccagcacagcaggggagagggccctggctgccccctcttctcctggccacagtcatactctctccccagtgtggagaccaggtggaggctcatccccccgagcagctgggagagaaaccctgtgtctgccctgcagctgctccaaggacactggagaccaggaggcagcgggtggggaagcaggaatgcctgcctccccgggagcacctggccacgtcaagcttagtagccaagctgtattcaggccctagcctggcggcatggataccgcgggccagacaggcatccttggagcctaggaacccctgattccccaggtggactgttctcggtgactccagcaccctctcacccaggctcagtcttccactgaactcctaagccctctctggccattcggaggcttgacactcacgtgtaggactagggtgctccgagtgacccggtcaatgggcttgtagagcagagctgtcgggggagacagggagaaggaggaagaggatgatggacgagggcaacccaacaccccagagaccagcttcgtccccccacccgcatgcttcccacgtgaacacccctcgagggacaccagagtgagcccacggcagcccccacctctgttctcactccccgggccgaccaaacagcagacacaggtgacacacagccctggcagcccctgctccctccgcagccctgcctcctctcccatcagacatggcttcatcgagagccgccccgcccccctccccaggcctgtcctggcctcacctggctcaaggcagatgctctcctggacccccagccctgaatcacacagctccacccagccacgccccgaagagtccagcacacctgccacacgcaggaccccagaatcacacagctccacccagccacgccccgaagagtccagcacacctgccacacgcaggaccccagaatcacacagctccacccagccacgccccgcagagtctagcacacctgccacacgcaggaccccagaatcacacagctccacccagccacgccccgtagagtccagcacacctgccacacgcagaaccccagaatcacacagctccacccagccatgccctgcagagtctagcacacctgccacatgcaggaccccagaatcacacagctccacccagccacgccccgcagagtccagcatacctgccacacgcagaaccccagaatcacacagctccacccagccatgccctgcagagtctagcacacctgccacatgcaggaccccagaatgggggaaggagacatgctgtgtttccaggaagggcagctctccagaccttatcattctcaggctcctggagctgaaggccaggcacagccagctgggattggcatgcctcactgtgatccacaggactggcctcatctctcagaggaaagacccctccccacatcctcaaaccccagatagcaaagcacaggaaggctggaggcagggaggctggaggccaggaggctggcctgatctccacagaaaggctctgctccccgaggccagcctggccaaccagtgaaaccccatctctattaaaaatacaaaaattagccaggcgtggtggcacatgcctgtaatcccagctatttgggaggctgaggcagggaaatcacttgaacccgggaggcggaagttgtagcgagccaagatcatgccactgcactccagcctgggtaacaagagcaaaactccatctcaaaaaaaaagaaaaaaggctgtgctctcaaacacgtggcagcctgaggggcaaaggtttcctgaagcaactcaggttaggcctcacatatgagagccccaaagaggctgggaggacgcaggcaaggccagcccaggcccccaagagccacaccctccacaacccggacaccaagtgaggatggctgggattcagcagggacaggtggaggtggcagctggtggatcaacacttcccaacacccttcctgtacgcggctgcgcccaccctcccaacaggaggctcagcttcagtcctgcacctggatgctctgtccctggggtcatgaccttgggcctcctgccgcaggggcagtgacagaggcaggttggtcatctgggaagaaggatcccagactgggtgtcccataagaccaggttgtgacaggtcccagcgtgaacacgcacgccctagccgggccccaaacctgatagttctccaaagcctgagatataaataccccgtgcgcggctaagcagacacttcagggagcaatctgctggctgtgaagaaaatgcagcctcagcagggccaccagccttacccgcagtccgagcttggctgcctgtcggaatcactgggggagcggttaaaagatacagatgctgctccccagccccgtcaactcaacccaaatctctgcaagaccacaagggccatcagcatttctataaagcttctttactgatttgaatgtataataatggttgaaaaccactgctttatgttttatttatgtatttattttaatttttttaaaaatatagagacgaggggccgggcagggtggctcacgcctgtaatcccagcactttgggaggccgaagcgggtggatcatttgaggtcaggagttcaagaacagcctggccaacatggtgaaaccccatctctactaaaaatacaaaaattagccaggtgtggtggcaggcgcctataatcccaactacttgggaggctgaggcaggggaatctcttgaatccaggaggcagaggttgcagtgagctgagattgcgccattgcactccagcctgggcgacacagtgagtcttcgtttaaataaaaataaatatagagacaaggtctcactatgttgctggtctcgaactcctggcctcaagccaaatacaagctggtctcgaactcctggcctcaagcaatcctcctgcctcagtctgccaaaagttgggattacaggcatgagtacccggccaaccactggtttacgtaaatacacttcatatgacatatctgtagccctttcttatctagcagtttccagagaccctccccatgggccatggaagcttgaaggaatgaggccagtcttggggtatcctcggcactgagggtgcagcccaggtcctagctcaggtgggatccatttctgaggctgtttaaggcacccacctgtggctcagcccatcttcagggggaaaaaatcacactggagaaccccagagacccaaaagaaagcacaagctcagcagacacctgccagggtgggctccggagtggcggctccacagaaagctgacactgcattatcggctccccgcagccctctcttgggtcccaagaggaagaggtttctgactaagctcagaggtctgaacacatggcaggttgggtttcagaggggttattaacatgtctgtggtcacctccagagtccacctgagtaaggctgtggaatgagccctggaagggcggccaggagggcaggtgcacggggggggtgggggtggggggggtggcggcactgggaccacatcagatacggagggaaccgggggaataagagcggccctgaagtttgtgctccccacggcccctgcacgctggggtcccctgagaactcagggtgaggcactcgctctggcccttcccctgtccctgggctcctgcaggctggcctgcttcctgcccggcctcacccactctccctctccactgacactgacttgggcagcaagctggtctctctctagtttgctgggtactcgctctgtgcccaagggtactgagttaactgctttgctctcattatttcctgtgattaaaacgggaagcaattctcactagccccattttacagacaaggcaactgaggccagagacttgtggctacaagtggtgggagctgggtagatccacccgcactccttgctttgagctgcaccttcttcagggaaaggcagcacctgtaaaacctcaatgaaccacaggagcgttcttggaaagagtgaccaggatggggtgagccccctcctcacgagctggccctttcactcctcattccccactttgaagccgacttcaacaacagtatcacggagaccgaagcaacgtgaactccaggtcccaggtccgtttcactgagtcgaagcttccttttggggaagggagaggaagccaagggtacgtttccttttcagggaggcagagtcaagacctgaccaactcctaggccagaccaaaaagaccatttctcctctgatcgctgaccaggccaatttcaagtgagaacagggttcctgcagccgccctgctgggccgcaggagagaggctgcctcagagcttgcttccatcaagagggtcctgagaaggtcagggggcactggccccacacagcccctccagcacagccgcccctgggaaggagcccaggaaacctgccatctctcttccggcaagccaccatccccctcaagtcagccttcgacaaggagctccaaggagctccaggttaccagggagataggaaagcaaagtgactgagaagggtgcagagccgaaacacctggtgggaaggaagaggaaggtcctaaaaccagccgcctgctgctcccacagactcaggcccagagcagccggcctgggagccacacgtgcccaccccactccctgccacaggcaggcagggcaccccttggcacgtcttgcctcttgaggcagggtccacgggcttctggacacctccctacctgggccggcttcatcctcctacgaccgacagtcgtgttgatgacatgcacctgtcccgggacttccccccagcccccagccagctgcgggagctgcaaggaggatggtccgggtcccttccaccgaaaggtggtgtgtgtgtgtgtgtgtgtgtgtgtgaccttcacagagtagcttgccacacccctctcccgctggccctgccgacctgccttccacagttgagggcccagacctcggctgggggtctctcacggctggaaacaaacctctccttcctgctcccacagcccctccgtgtcctccgcctactgctgcatgtgcgcggagcacacaataccgtgccgcccagcctccgcgcctctctccagaaacaaagaaactcccaacttctccctctggctcgcgctggcaccctctcggctggcaacgccgccgtccggaccatcgccacccatcgccacgctgtgcctggcccccgcagaccctctccctggcctcagggctactacgtctgcgggcacagctcgtcgccgtctctccctaacagcccctccaggaagttctctcacactagcccaccaattccccaccgatcctcggggccacctggacccctccagcctggtccttccatttgcaagcggccctgctctgagcagcccccaggtttcaactctaggctggatgccgccaaaacgaagggggaattcaggtccagccgctcgcccaccctccttccctgcggccctctaacctccccggccacatctaagcccactccagccggcccccagaggtgggagggtccgccacctcccacagcgagcacctgggttaccataggtgcagttacagcagaagcgaataatgaggagaatctccatggcagcctctgtccccgcggcgggagcgtgcagccatcgctccaggctccccggcgcccaccagcagcccggccactcagccaccttgctgatgctgccgcacggactccagcatcgggcagccgctccggagtgctcttccagcaagggggaggggagggaggcgcgtggcgaggagaggagggaaggggaaggggaggaggggtagggagggagggagccagcagcctgctggcatcctaaagaggagcacgtttgtagctggctggctgcctgggcacgaggctagagtcctcgcgtgcgcgcacacgcgcactcagctcacactcacacgcgctcacacacgctcacgctcacacgcgctcacacacacgcacacacaaggggaagggcgccgcgttcacgcagcctgttgcctgcacagccagacaaaggtaggtgcctgtaatccagcccgctccccgaggtaccttccatggtgacagacgtgtggctgtccttggagtccttgggacctttcactttgagttcctgccaaagggaggagaggagtcatggcctgttctgtccctcacctctcccagcccccactgtgagcctggcaagaaggggagttctgaaactcagggtgtacatatgagaacagaggccgggtgtggcggctcacgccagtcatcccagcactttgagaggccgtggtgggcggatcacctgaggtcggaagttcgagaccagcctggtcaacacggtgaaaccccatctctactaaaaatacaaaagttagccaggtgtggtgtcaggtgcctgtaatcccagctacttgggaggctggggcaggagaatcgcttgaacctgggaggcggaggttgcagtgagccaagatcacaccattgcactccagcctgggcaacagggcgagactctgtctcaaaaaaaaaaaaaaaaaaaaaaaaaaaaaaaaaaaaaaagaaagacaaaggagccccatggccatgggctgcctctgccaccccaatcccctgcaccacacctgtgaactcctggagcctcgtggagtccagtggctggggcgtgggcaagaaggaagggactccaggtcccagagatgagagaggctggcagggagccctgtgattacaggaaccccgactcaggaaccctacacgtcggccaagggcagacagggtttgagttgaccagcgccaggtactccagccaatctttagggcatgaggaacccatgaggtaggaaggaagggtcccacacgccagcagggaagtggtggaccttcggcagagatgctgagctccccaggacagtgagctgcatcctacccccatcagagagcacttactcagcccccagcacccccgacactccccacccaccactgcccatgctgggggtccgagaggaagcttcgagggaggaacagccaatgcccctcctggatcccaagccaggcagcaggtagtgagtactggaaagacccccgggatgactcatctgctccaagcctctttatcctcctttagagacgttccagccccagcttttgctaacaggacagtgcagcctgcaactggagctgtaataccatccccacttggcagacggagcacacggagcctcaaagaggggtgtgggagggaaggcaggaggcaaggtgaggccacggtcaggtgcccaggtgatgaggccagggtcaggtgcccaggtgatgaggccaaggtcagctgcccaggtgatgaggccaaggtcagctgccgaggtgatgccacctgcttggtctgcaggggaggaagcgctcagacagcaggaacttcctacttctgtctcaagctgtttctagacagagaaaactcctggagatggagcttgggtgtgtgtatattttggggggcgggggggtgggggatactcagcgtccccagcctgtgtctctggctggtgcctggactcccagatttcgggaatgtttcctcacgccccctccagtgaagtctagggtatgaaatcactcctgctgcagagaggagcctaattgcagtaattaagtggcagcctcagcaggaagcaagcacgtcatcgagtgagtcaggatgagaagccacctggcagaaagccaggggcctggctctgccctccagggtgggcaggctgtgaggggcttatggttgggtgtgggggtttctgcctaggcacagagaacaggcaatcagcccaggccaagagaagaccccacactctctgcaccatgtctgaccccgggatcttgggcggccttggcagggctgatctgaacacagaccaggggagtccaggtagttcctgggttgggctggaaaccgcagggaaagcaccatttctccagccccttttatttgtatttttaatagagacggggtttcaccatgtttcccaggccggtcttgaactcctgggctcaagccaatctcccgcctcggcctcccaaagtgctgggattacaggcgtgagccactgcacctggcctctccagccacttgactccatggagagggacttccccaccctgcacttcgtcctcccaggcagagggtgacacatctgctccatgggtctgggagaagaaactatggtcagccatcctctctctgcacactgggtaagaggcgtgggctctgtcctcattgtggagaggggcctgtgttttcctattcctgcaagggactcaatagatacttttttttttccagacagggtctcgctctgtcaccagactggagtgcagtggcgtgatcgcagctcactgcaacctccacctcccgggttcaagagattctcctgtctcagcctcccaaatagctgggattacaagtgtgcaccaccacgcccggctaatttttgtatctttagtagagacggcgtttcgccacgttggccaggctggtctcaaactcctgacctcaggtgatccgcccgcctcggcctcccaaagtgctgggatgacaggtgtgagccgccacgcccggcttctataggtacgtttcattccagaggcgaagtgtcagcaagcccactgtggctacagatccaaatccacattttccaagctgcatttttttaacagtaatgaaggtgacatgttcatctccaactgtcagcttctctgctgcctctcggtggattctaaacgtgggcatcgaccgtcacccctgaagtttcaggaaaactaccctgcgtttccccaactcttctagcgttagagctgagacgggaacacaaagggccaagaggggcctttacggcaggactcccaaaactgcagaagcttctccccttttctaggatggaggttctcttgccctgagctgggggctgttcctctcaggccagtgcttcaggggtgccactgaggtctttttggacaaagggatgaactgggctctgtcctgaaggatcctaagcaactgtccctccatgccacctcttaggtagaaatgttgatggcagataggactgcacctctgccctgtggaggagtgcgggaggaaggctgggcctcaggagcagaagcacgcgtgttcccagccaggaaggctgggcctcaggagcagaagcacgtgtgctcccggccaggtaggctgggcctcaggagcagaagcacgcgtgttcctggccaggaaggctgggcctcaggagcagaagcacgcgtgttcccggccagggattctaaggctccttctccacataagtggctcttaccctttttgtgtttatgggatggcagtcttagagttggcaagaaccttaaaagacgacctatagtccaaatttcctcaagacttccctgtcataaatattacccagaagcttgttcaaatatagaatcttgggccccacgcaaagccttctgaatcagaagctccggggaaggtgccaggaaatctgtgttttaaacaatgccccagtgattcttatcaagcaaggtcaggattagctggccaagctggactcagtggctcgcacctgtaatgtcagcactttgggaggctgagacgggcacatcacccgagttcgagaccagcctggccaacacggcaaaacctcatctctactaaaaatacaaaccttagccaggcgtggtggtgtgcgcctgtaatcccagctacttgggaggctgaggcaggagaatcacttgaacccagggggtagaggttgcagtgagccgagaccgcgccactgcactccagcctgggcgacagagcaagactctgtctcaaaaaaaaaaaaaaaaaaaaaaggattatctggccatttctaaacccctcattctaccggacaggacataaaagccaagaggggggacgtgacttgctcaaggtcaccatagtgtggtgtgggagaacactgccttggattttttttttttttttttttttttgcctcccctgttcctctctctaatctgaaagagaataataaaaaaataaataaaatagatcgttttctattaagagggaaaatgtcaggtgcaagaaagcaaatatcaggctaagtgttacccattagagtaaccacttcaccgactggcaagcgagggaggggagaccaagggctctgagcagcccccaaagctccttgtccctcagggtggctatgtggggagcggcctacctctgagatcttctggaactggttgttggactggctgcacttctcagctgtctccagagcgactttatagttatcgacaaacgctttgtacacaccgagctggctggcctgcagggaggagtcagggaacagagggagaggagggtgggaggggagaggattaatgaatggatgaaagcttcacggagcaccgggagctcccctgcactgaaaacctctcactcagctcgttgggaacttggggaaacgcagggatgaacatattacagtgtccctttgaactggacagtttccatggaaaccagctcagccaataaggttaatgagggggtctggggttggggagaccaggctagggcctttgttggcctgctagaaattcaactcttcacagcatccagctttcctcagcacggtgaaggtctcccagggtttgaaatcccttaatgtctcatacttccttcacatcctggaattagccggagcagggagagaggggggtgtgtgtgctggggggagctggcacgtgtggcctgctcaggcctccctccccacgtgcagcgtggggaacgacatttaaaggtgctgtcttggccgggcgtggcggctcacgcctgtaaccccagcactttgggaggcctgaggtcaggagttccagaccagcctggccaacatggcgaaaccccgtctctactaaaaatacaaaaattagctgggcatggtggcgcgtgcctgtaatcccaggtactcaggagaatgaggcaggagaatcgcttgaacccaagaggtggaggctgcagtgaaccaagatcgtgtcactgcactccagcctgggtgacagagtaagactccgtctcaaaaagaaaacaaaacaacaaatgaagatgctgtctttccatttcccttggccttgaggccccgtcctcacctcttccacctcctctacctccaaggagccaaagccccagcctcactacacgtttgcctgtcactcacacagtcacaacctgagtcacaaccacacagagcctcgcctcttctgagaggcagggcagaccccatcgcccctttctgcaaaaggggaaaccgaggctccataagtcaattccccaaatatttatggaaaggcttcgctgcgctgtatataagcacttcctcttaagggaccaaagggtagaaattcaaattaaagccatcacgagatattttatactcatcagaagggtcaaaatttaaaagtctaattgacagcaacggctggcaagcatatggggaaatttaaactccctgtttttgtttttgttttgagatggagtttcgctcttgttgcccaggctgcagtacagtggtgcgatctcggctcaccgcaacctcccggattcaagggattctcctgcctcagcctcccgagtagctggcgttacaggcgcccgccaccacgcctggctaatcttgtatttttagtagagacggcgtttctccatattggtcaggctggtctcaaactcccaacctcaggtgatccacctgcctcggcctcccaaagtgctgggattacaggtgtgagccactgcgcccggccaattaaaacttttttttttttttttttttgagatggagtctcgctctgtcacccaggctggaatgcagtgatgccatctcggctcactacaagctccacctcccaggttcgcgccattctcctgcctcagcctcctgagtggttgggactacaggcgcccgccaccacgccaggctaattttttgtatttttttttagtagagacggggtttcaccatgttagccaggatggtgtcgatctcctgacctcgtgatccacccgcctcggcctcccaaagtgctgggattacaggcgtgagccaccgcgcccggccaatttaaactcttagactactcggggaagtgtaaattagtacaattatttggagagcaatttgttaataactaataaagctgagaataggcatggcctattttcagttgaactaataacagtgtggataggcacagcccatcgattgcttagcaaatccacttttacatacaaactgcagagccgtatcgttcagtgcagtcgccaccagctacctgaggctaccaagcacctgagatacggccggttcaaactgagacgtgccggacatgtaaaatacacagtgggttccaaagccttagtatgtaaaagagaatgtaaattacctcgttaatttttaaatactgattacatgttcaaataatatttggatctgcgggaataaataaaagatattctcaaaattaatttcacctgcctatttttacttttaaaaatgtgggtattaggggccaggcgcggtggctcacaactgtaatcccagcactttgggaggccgaggcgggcagatcacctaaggttggcagttcgagaccagcctggccaaaatggtgaaaccctgtctccactaaagatacaaaattatccgggcgtggtggcacgcatctgtagtcccagctacttgggaggacaaggcaggagaatcgcttgaacccaggaggtggaggttgcagtgagcccagattgcatcactgcactccagcctgggtgacaagagcaagaccccgtctcaaaaaaacaaaaaaaaggtgggtattagaaaatgtgaaatgatgtacgtggctcataagctatttccattagacagcagtgctctggagcaaatggcctatgtgtgtgccccaggggactcaagggtgttcaccatctcacttttcctcctcatagtggagggactggtaacaaatgctcacaaacgggggaagccgcgcacacagccatgaacatggatgcacccgatttacacatagcattgctgacaagctccaaaacgaacatgggttgaactgtaaaatacgattgctgacaagctccaaaacgaacatgggttgaactgtaaaatatgatatatgtgtatacttatacacttttttttttttttttgagatggagtctcgctctgtcaaccaggccggagtgcactggcacgatcttggctcactgcaaactccgcctcctgggttcaagtgattctcctgcctcagcctcctgactaactgggactacaggcacgcaccaccacacccggctagtttttgtatttttagtagagacagggtttcgtcatattggtcaggctggtcttgaactcctgacctcaggtgatccacccgcctccgcctcccaaagtgctgggattacgggcgtgagccaccacgcctggcttagacacatttttaaagtacatgcagctgggagctgtggtacacacacctatagccctcgctacttgggagactgaggtgggaggatcacttgagcccgagttcaagtccagcctggacaacatagcaagacctttttttttttttaaagtacaggccaacccaaaatagatacagatatgtagtaaacacacaaactgcagtctggaaggctatccaccaaattcatgccagtagctgcttcaagagggaggagggaggggagactccaccttcatgtgtgacgctgtattttcttcattagaaggttctgctgttattctttggagtttctggtttaaatgtttttcaatacagcagcaagggggatacagctgctgcctggcttcctcaggggcctctgcttcccaccaaggtgctgggggaagtgggctgctgtggacccccaccccggaccactctgctttctgcaggatcctcatgctccccaaggacccagagaggctggggtgggggtaggggtgggggcaggctggccgcagcatcggctgagcctggagcctcccagtacagaggcagagccctttgaggaagctggtggggcaggggagcggggggcatctggaaaagccagaggggagcgcgagtggggacgcccggcgtgacgccaaggccagaggcattcaggtctcagctgcagaagggcaggactttaaaagggggcagggccggacttttaaaagagggcggggcctgagttttaaagggggtggggcctgaccttaaaagggggcggggccggacgggagggagtttatttccttttccagggagtactgaggcccggcccatcaatgcccacgctacacgaggcatactagacagtcgctgcctaagccaaagtcagatcaccgatattcttccaggaaaaggctcctcttgccccctttcccacaagaaggagaaagcctggaggcccgggttggcacaccaccctcccaggagccaggggcaggagccagccgtgcggaggcctgcgtccagggtcacggtaatctcagggactgccgctgccacagtcaccccaggcggtagggcccgaggcctggcttggcaggttcattaactgggaagtgcaggttgcctggaaacagcagcctggcactggagtgatctcataaaacaaacagcagagacgctaattcccttctctcagtaacgaataatcaaatacccagagtcttcggctgaaaataaaccacctccggatgccagacctgacccggctccccccgggccctcccaaatctgcagccccaggggcctcaggcatcggttcacgatgctggggagggaaagtggtgggtagcagattcacggccaggcctgtggagccaagaccagaaccggggacagccaggtccaagtgacaaagataaactgtgacagcgtttccagcaaccctaggtttgctctcctctaccctcctgagggatgaggagaggatgccccccaggccactcagctcaggtgagcaggcagtgatgacaggtgttcaccatccctgaaccggagggagcaggggggggtatgctagaaccagagtgtggcattcccttggaaggataccttccagggtgcctcttcccaatttaataataataataataataataataataataataataataatggcactgatgataatgaccagttattgagtacttattaatttatgatgttccaggccctgttccaagcactttttcttttactttattgtattctatttctttttttgagacagagtcttgctcttgtcgcccaggctggagtggagtggcacgatctcggctcactacaacctctgcctcccgagttcaagcgattctcccacctcagcctcccgagtagtagctgggatcacaggtgcgtgttatcatgcccggctaatttttgtatttttagtagaaacggggtttcaccatgttggccaagctggtcttgaactcctgacctcaggtgatccgcccaccttggcctcccaaagtgttgctgggattataagcgtgagccactgtgcccagccatttttttttttttttttttttgagacagagtctcagtctgtcatccaggctggagtgcaatggtgtggttttggctcactgcaacctctgcctcccaggttcaagcgattctcccgcctcagccccctgagtagctgggactacaggtgcattccaccacaccctgctaatttttttgtatttttagtagagatggggttccaccatgtaggccaggctggtctcgaactcctgacctcacgatccacccaccccggcctcccaaagtgctgggattacaggcgtgagccaccacgctcagtcaggcctattctatttctttgtagagatagggtcttgctatgttgcccaggctggtcttgaactctaagcctcaagtgatcttccagcctcagcctcccaaagtgctgggattacaggcgtcagccaccacactcagccccatgcagttttcagatattaactcctcaaaatcacccaatgaggtaaatactgttactatcctgttttttacagatgaggaagctgattcagagcggttgggtaagttgcccagttgcaggtttaatctggcagcgctgggattcaagcccactttgtgacacggctctagaagctgtgctggagaaacaggactctcaggacagaaatctcaggccctgcaacgtctccctccatgcccttccgagttctcccgaggcccagtggtcaaggtcacggtgcattcactcattcaagcagtgaccactgggctggttctgggagtctaagaagaaggaaatgcaggccgggcgcggtggctcacgcctgtaatcccagcacttcgggaggccgaggcgggcggatcacctgaggtcaggagttcgagaccagcctggccgacatggcgaaaccccgtctctactaaaaatacaaaaattagccgggtgtgatggtgggcgcctgtaatcccagctactcgggatgctgaggcaggagaatcacttgaacccgcgaggaggaggttgcagtgagccgagatcacgccactgcactccagcctgggcgacaggagtgagactccgtctcaacaaaaaaaggaaatgcagtccgtcctcctggaacttgtggtttgggggagtcaggcagttactagtgctcactacgaggactggcacaaggcctgcatttggcgacttggaaagccttcttggaggaggtcccttctaagctgggaactgaccaggggaggccagacgagagggggaaggacgtttcaggcacacggggcctcaagtaccaagagttaagaaagtgcctgccctgggaactgagaacagaaagtccagtgtcaggagcacagaggtgcggggaggaagctgccaaggctggggctggacacgggtcagtgtgcaaagggtctctcgagccattcctcggagcctgaccttcatccgagggccgtggggatccgctgaaggggccgtcgaggtttcagtgactctctcccctctaaggagaggtgggggtgggaggtgagtgggcctggaggcaggagccacacaggaggatacgcagctgtccaggtgagggccatgggtggccaagaagaggaaaaggcggctgtgagcaacggccaaaaagtggagtccacaggacaggtgggggagggggtgcagccagaaagagtctgaagcactcggtgaggtaaagacaggaagcggagcaggtgacgccggaggcagggagctcagctctgaacacactcagctagaggtcctaggagtgtccaggcaggagagggagagtcttctccagcgtgagaaaggcagagccctgtccattcagccagaacacggcaggggaggggaggaggcctccagcctctcacacccagagaacagggcaggaaggaggagaaggtcctctggccactcacacccagagaagaaccgcggcctggactcccagtctccctcttgcctgctgggcggtcagacgttacgtagcagaggtggggagggagctccatgagtctgacctgggggtcctccaggggacacagccagagatggggcagagctgggggagagggtgtcacagaagcacagggaaccagaagacttctgtgaacgtttcccaacacgaggtctgcatgttaacccacccactcctgccgctcccgaccctgcagtggtgagcagggctgggcttcagtgcttcctgctcttgggacctcaggagaggatcatcggccagtgtgcccaactgcttccttttacagacccgaggtctcaggggagcagtcctcatgcccctaacccggcatgtgcccctctgttcactgagggacaggagactgaagcccagcaagaagccttcattccagggctggttcctcagagcaccctccgggagagagagggagcaccgtccgggaaagacggagcaccctccgggagggagaaggagcaccctccgggagagagatggtgctcccacagaagtgcccatccacacagcccatctccaccacccctggaaggacctatccacacagcctgtctccaccaccccagaagctcccagggctgcaccaggggaggcctagagtcaaggccccggccccaggcaccccataacacacaggcccaggccttcctcccggactcggagaggtctcaggccttcaaggagtccgagagggctgcccggtcctctcctgaggctcctgcaacactatgggctccactgaggccctgcgtgaggaccctccatccctggcagactcaccagcttctggaagaggtggcccatggtgacctggctgtcccactgttgcaccttggggcacaggttgtcatagaactccttgtggatctcatagatgtcctggatcttgtagaagatggtctcgatctgctggatggtgagcacgggctgggaggtggtggcggtggccttcaggggtttcatgggctgggagaaacagaggaagaaagagcagaggtcgggggtaaacaaaccagagtgtcggcaggccccggggccgatcgttagcccttcccgctgcccaagtcctgcccagacaaggctgccaaaggcagggcactgaaacgagctttgtatcaaggagccactgccacaggccccaacaagccgcacactcgacagcaggaacctggcctggcagctgtgccaggcccgaggggtggtgcctgggctcactcccctaccacgcagctgagctcagcagcagcctgtactgggttaacaggatccgcgtctttcttccacgatagcctgtgccccgagtcataagctccttgtcacacttcagtggaagggagggttgacagggaactcaagcctatagctgtttccttccaagaaacagaatgtggttctaggactcagaaggtagggacccgaagttactcaagaccagtcttggcctcactgatgttccaagttcccgtcacttggcacagggagaggcatgggcgttcacgtgtcccccactgcagcccacccccgtggcagacattgctaagcgaccgtgatggtccttcccactgcgcatggcaggggtctccagtctcagactctttctcaatgcctgcctgtctataccaagatgctccagggcctgccagtgtagacggtgaggtggcagataacacagaccaacccccagcactggccgggagctgatgccatcaccttccagcctagcagtgggaccgtgggataacgggacgtgcaggcatttcctcagtgtggttctctgcattttataaatcacctacaatgaatgaatatgaataatcagaaaaaaaaaaaccaaagatgaccaggctgtactgcaaaggccctgcaggacacagggcctgataacctgccatacagggaaggtgtggcagggaagggcagggtggccagagggagagcagccacgtcgaattcttttttttttggagacggagtctcgctctgtcgcccaggctggagtgcagtggtgcgatctcggctccgcctcccgggttcacgccattctcctgcctcagcctcccaagtaacagggactacaggcgcccgccaccacgcctggctaattttttttgtatttttagtagagacggggtttcactgtgttagccaggatggtcttgatctcctgacctcgtgatccacccacctcggcctcccaaagtgctgggattacgggcgtgagccaccgcgcccggccagccatgtcggattctgttgatgttcttcacctacctgaaggccacgtggaaagaggcttagacttggctggtcacggtggctcacacctgtcatcctagcactttgggaggccgaggcaggtagatcacctgaggccaggagttcgagacaagtctgaccaacatggtgaaaccccgtctctactaaaactacaaaaattagctgggcgtggtggtgcacacctgtaatcccagctactcaggaggctgaggcaggagaatctcttgaactcaggaggcagaggttgcagtgagccaagattgcgccactgcactccagcctgggtgacagagccagactctgtctccaaaaacaaaaacgaggcttagacttaatctacgttgctctgcagacccaggaacagtggggaaaagttatggggtcagattcgggctcactagagctgtcccccataggattaagtagtgagctttccgacaagagaagcattctagcagagaatgggtgactccactgctgaaaatgctgcactgaagggaacaccaaagccagcgccagctccctctgaacgacgaccaccagctccagccaaccacggcaaactcccagcccagcctcactccagcctcacatcacctcattctgatgaagtctcatctactcagatatatcgcctcactctgatggagacagaacccatgttcactggaagaagtcgtctcatctactcagacacccagatggtgctctgccttctggctccttcatcctccgagctctaaaaagcccagatccaacaatccatgcaggacaaagcaggaccctccttctgaccctcgccgcgctagaaacaacggcccctcagtgtccagtcaggactctccttctgaccctcgctgtgctagaatcaatggcccctcggtgtccggtcaggcccctccttctgaccctcaccgtcctagaaccaacggcccctctgcgtccggtcaggcctctccttctgaccctcgccgtcctagaaccaacggcccctcggtgtctggtccttgctaggcaagcgcatggggttccacctggtgcaggccaggcagggtgggcttgagtcgcagctctgctgtgcgcacatcactcagcatccctgggcttcgtgtcaccagcagcctcatgtgtgaaactgggataatacagccatgcgctacctactggcattcccgtcagtgcgtacacgatcatggtcccagactgcaattttttttttttttttttgagacagagtctcactctgtcacccaggctggagtgcaatagtgcaatctcggctcactgcaacctccgcctcccaggttcaagcgattctcctgcctcagcctcctgagtagctggaattacaggtgtccaccaccccgcccagctagtttttgtagtttttgtagatatggggtttcaccatattggtcaggctggtctcaaactcctgacttcaagtgatccacgtgcctcggcctcttgaagtgctgggatgacaggtgttgagccaccatgcctggctgagacctttataatccagttgggcaaaatgggccaacacagatgaaatgactatggacgatgcgactgactgtaagcaccaaccacatggttccaaggttgtgctggagtagcctggagggctgcatggaggaggcacacataccaggtccttggagagctgagcaggtggaggagtgggggcgtagagaggcatgccagacagggaaacagaaggcaccgggaggcaggagcaagggaagagtgtccccccaagcccaggtgggtgagctgaaagctttggggactccccaccctccatgagggacatggaactagcttcaggattgacatcgtcgtaagagtttatccttttcacctcaacgcaggaccccacggaggagcccgcagagtcgccacagaatccccatacccaagaattcttgtccccgccttggcgcagtccccactgagggggaaataagggaagcaggaaggtcagcagtcccaggaaggccaaggagacgggatttctcagaagccgcgacgcgctcatctgccacccacacgaagacaaaacacaatggttatgcttcctcctcaacttcccaccccgtctgcaaaaggggaagaaatggacgctcacccacagccagtcacaaggacggggcctgcgcttggggcatcagatggttctcatgacacgatggggaccttggctgttactcctgatttcactcgcggggaggggacagggctgggtgtgtgcccttggctggccaggaccctcgaggccgttatttgtctctggtgaagtcctgcgtatgggctcaggggcaggagggtggactgaaaggcaaggtgacccacactgagcttcggcacggcacagccattctgccaaagcgctagcacaccactcaggcaccccctcctccccagtcctgctgcagggacaagggcaggccccggctctccatttcaccactcgagttctcggagaggacccgtgagtgacttcaaccctggctcccataccagctgcttctcaggaagacgggcctgggccggttctcacttgccagtgggacttcacatagccgtttgtcagctctgtcccccagcgaccggcctttcgaaataagggaaagaaatgtacccacttcctccacctcctgccccagaaggcctggcatgcttgctgccatgccacccgagtcactcgtcactggagcccagggaggaaggcctcattcacctgttttatagataaagagcctgcgatgcagcgtggccaggagtccaccccaggagggccagtcgtggccagcggtgggaggggctctggggagtggcctcaccctgtggccccagcgtagcaagacacagttcccaagctcagttcccagtgtcaaggagatccagaatttcaatgcagttggcttcatcttttttccttcaccccctacttcggcccaggctcccaggcttttcctgtaatcagagcccaccaggaagcaggagggccccagaagatgacccccacaagcaccccagaggccaggacggaggcttctgtgtggaggctcgtctgccccgtgtgtgcacatggttttaggtacacacacccagccctttgcatatcaggaagtgttcagatgaaagcaaacaggctggggcagagcggtgggaatggggtcaggagtgggaaagcgagcatggagggaacgaatttcttctccttcaagctggcacctttgcgaggccaccccgaagagcagaaggtttagcttcctcctagctgaggggtggggagggtgcaggggttcccagctcagggaggagaggaggaagggtgtgattctttcactctgaggttttcttctgaggctgtggctgtggagggtcctactcctcttcctgagccctcctaccacagacctggcctcccagcgagttcttcctttgctccctctggtctctgctcaagaaagagccaagcaggggcccaggaggagagagctgggggaaggtggggaacccgccccgggaggagagagctggggaagggggggaacctgccccgggaggagagagctggggaaggggggaacctgccccgggtggagagagctgggggaagtgggggaacctgccccgggaggagagagctggggaaggggggaaacctgccccaggagagagctggggaatgggggaacctgccccaggaggagacagctggggaaggggggaaacctgccccgggagagagctggggaaggggggaacctgcccggggaggagagagccggggaaggggggaacctgccccgggaggagacagctggggaaggggggaacctgcgccaggcatatcaggaagggggcccctgccccacagattctgcctttggggcatgagctgttagaaaggcagagcagggaggggctcttggtcttggcccagaggaagaggctcgtgggtggcaggtgggatctaagggctccgtgtctgatggggacaggcgccactccctccttcagggaacgggtgtgttgtggcagaaaccacgaagccctaacctgtctcctctcccagcaatagagaaattaacagtgtcaacgaacactcaggctgtgttctaagagctttatgtgccggacacagtggctcacatctgtaatcccagcactttgggaggccgaggcgggcggatcacttgaggtcaggagttcaagaccagcctggccaacatggtgaaatctcatctctactaaaaatacaaaaattagctgggcgtggtggtgggtgcctgtaatctcagctacttgggaagctgacacaggagaatggcttgaacccaggaggcggaggttataatgagccgagattgtgccactgcactccagcctgggcaacagagcaagactccgtctcaaaaaaaaaaaaaaaaaaagaactctgtgtataaattcctttaatcctcacaacgaccccatgaaaagcatactatttgtatacccagtttgcagatggaaaaactgaggcacgatagctcattcacctgctgaaagcctggagccagtacggccaggcagtctagatcctctgtctgaactcctttcaaatacacaccctgttagtaatgacaactatgttcctttttggacagcaattcacggtttggaagacgtgtttcacgaatgtctgacgggttgtctctttgcctgtcctcctttcttccactaacagttgagtgtcttaagtaactcaacgctgtatgaggtcccgaaagcatctcccgatcttctcaaccccatggaaagagagagaaagaatggcatccctctcatcttcagatccagaaatggaggctcaaggaatttatgtagggcttgcccaaagccagcagttttcttttctttttttttttttttgtgatggagtctcactgtgtcgcccaggctggagtgcagtggcgcaatctctgctcactgcaagctccgcctcccaggttgacgccattctcctgcctcagcctcccgagtggctgggactacaggtgctcgccaccacgcccggctaattttttttgtacttttttagtagagacggggtttcaccgtgttggccaaggatggtctggatctcctgaccttgtgatccgcccacctcagcctcccaaagtgctgggattacaggcttgagacacggcgcccggccaaagccagcagttttcaaacccacaacaggtgtaagacaccatgggcccggcaattacatatatatacaggcacacagacagacaacaaaccgaaagttccctcacttatctttcccgtgtatgatgcatgctgacattttttcattggtttaaaaatgctggttcaacccactgtactggtttcacaacccactgtactgatttcacaacccaaagcactgatgggctgagaggcacagtttgagaaacagtgcaatacgcctgctcttaatggcagggccaagtcttgccctagctctggccccagaccaggaccctcagctacctgccacactgcccctcacttggaaaacagctccgtacacacagataaactcctggagagatgggacgtactcagcctggcgtgtggcaaaacagctgcacattcagagtttcactcttgttgccccggctggagtgcaatggtgcaaactcggctcactgcaacctccacctcccgggttcaagcgattctcctgcctcagcctcctgagtagctgggattacaggggcccgccaccacgcccagctaattttttgtatttttagtagagatggggcttcaccatgttggccaggctggtctcgaactcctgacctcaggtgatccacccacctcggcctcccaaagtgctgggattacaggtgtcagccactgcacccagcctttttttttgaggaatttcacttccgtcgtccagtctggagtacagtggcgcactctcagctcactacgaccttcgcccccagattcaagcaattctcatgcctcagcctcctgagtaactgggattacaggtatgcaccaccacgcctggcttttttttgcatttctagcagagacaaggtttcaccacattggccaggctggtctcgaactcctgtcctcaagtgatctgcccacctggggctcccaaagtgctgggattacaggcactgagccacggcgcccggcctgcacctgcacatttacacagtcattcctgggtaacataaatgtcaagtcccctgggacactgacagcatctcagggttgacgtgtgacaacacctcacgtcatggcaagtacttaaatgtgcatcttagaattcttgttaagaatgagcttccacagatccacacttctgcgtctcccttttctgacaattaccttatgtctcaggctgcaaaatacccaaaagaaagattgacacgccacgatcactctgcataacatccagacacatctaaggagcactttcttccaaggcaaaaccacctcacatctgtgtagtacttttatcttccgaaaacattttcatattcccctcccaatcagactctcacaacgatgcctccatctgggaggggaactgaggcatgttaccgagggctgagcttggcctgatgcctcagagctgtgccgcttctcaaaagaacacagacaggccgggcgcagtggctcatgcctgtaatcccagcactttgggaggccaaggcgggcagatcacctgaggtcaggagttggaaaccagcctggccaacatgataaaatcctgtctctactaaatacaaaaattagccaggactggtggcgtgcacgtgcaattccagccactcgggaggctgaggcaggagaatcacttgaacccgggaggcagaggttgcagtgagccgagatcgcaccactgcactccagcctgggtgacaagagcaaagctccgtcttaaaaaaaaaaaaaaaaaaaaaaagaacacagcctcccacctcatatttcctgacacggggcctcaggatggcactaacggttccctcacccagggaggtagaaggacttggacacaagacggcagagacttcttaactggattgattgggaatgactgcccagagcacagcgtggagaaggcgctcggcccccgcccaggcaggcagagcaccatgatgggttcacgatgccctatgccagggtcgtgggtgacaggtgtgtttgccatctctaagccgggtgtgcttctcctgccttttgagagctggagctgagaggcacaggccctttctggcaatgacccgggctgcccgatgcccagccagaagcagaccagctgcagactctgtccacagggagggacgggtacggtcccctttcctctccaactccaaaagcagcttcagagcatgacatcacccaacacgggcggggggaccggaaggccccagagcagggactgtactcaccagcaacagggcttccagctggttaatgtagatctcttcgctggccaagaaccccgagagaaccagcttcctcatctccaggcctttccctgcttccacctgcacaaacgcaaagcacagccaacagctcatgagcaaggaggccaaaaccctgcgtggacggtctgcttccctgcccttcccccccgacctttattttttttttgagacgaagtctcgctctgtcacctaggctgaagtaaagtggcacaatctcggctcactgcaacctccgcctcccgggttccagtgattcccctgcctcagcctcccgagtagctgggattacaggcacctgccaccatgcccagataatttttgtatttttagtagagatggggtttcaccatgttggccaggctgatatagaactcctgacctcaggtgatccacccacctcagcctcccaaagtgctgggattacaggtgtgagccaccatgcccagccattatgccagactaattttttttgtatttttagtagagatggggtttcaccatgttggccaggctggtatagaactcctgacctcaggtgatccgtccgcctcagcctcccaaagtgctgggattacaggcgtgagccaccgcgcccggcccccctttcccctttccttttattttaagcgacactttcataggggataaaagtcagatattattataaaaaatatacaaaacatgcagaaatataaaaggaaaagacaatcacccatattcctcctgtaacatctcgttttgcttccctcaatctattttccacctgggttctcgaaccgacttttcctccctctcttcctctcctcctgcctgtcccacacaccagagctggattcaactcctaagagtgccaccttgcccgatgcttgccaaggaccgagtatgaataccgcaaaacgcgagtacttggggattccactgggctatgtgtccatttatttattcattcaataaatatttactgaatgtccaccaggccctatagataccatgggaaacagacagtggcccctgttctcaagtggcttagactctagtgggaaagacatttattttttcttttttttttttttttagagacggagtctcgctctgtcgcccaggctagagtgcagtggcgcgatctcggctcactgcaagctccgcctcccgggttcacgccattctcctgcctcagcctcccgagtagctgggactacaggctcccgccaccacgcccagctaactttttgtatttttagtagagccgggatttcaccgtgttagccaggatggtctcgatctcctgacctcgtgatccgcccgccttggcctcccaaagtgctgggattacaggtgtgagccaccgcaccctgccggaaagacatttaaaaaacaagtaaagattcggccctagactgggacatggggcccaccatatcctttatgagccacctgcagtggcccggatgcccgtccctacccttccagtctttcccacagccaggacatcgctcagtctcccccacacgcaggagaaccagcctcctcatcttcaaaggtctctagctttcggttcgttctttacctgctgcctaaaatgccatctttccctgaggcatcgtggccacagaaggggagtgagagggccggggagacagggtagtggtgagggactgcttggaagatgctacactggtaggtttgaagacagaggatggggccacgagctaaggaatgcagagagcctttggaagctggaaatggcaataaaatgaactcactcccctagagcaggggcttccgatcttttggctcccctgagccacactggaagaagacgactgtcttgggccacacataaaatacaataacactaacgacagcagatgaactaaaagaaaaatatataatgttttaagagtttacaaatttgtgtcgggccacattcaaagcagtcctgggccgtatggccgcaggctggaaaagcttgccctagagcttccagaagcaatgcagccctggagatcctttttattttaattaatctatttatttatgtatttacttattgagacaaagtctccctctgtcgcccagggctggagtgcaatggcatgatctcagctcactgcaacctctgcctcccaggttcaagcgattctcctgcctcagcctcccgagtacctgggattacaggcgtccaccatcacacccactaatttttgtatttttagtagagatggggtttcaccatgttggccaggctcgtctcaaactcctgacctcaggtgatgcgcccgcctcggcctcccaaagtgctgggattacaggtgtgagccatggagccgggccgagatcctttttagatttctgtataagagaataaatttgtgtggttttaagcccttaagtttgtggcgatttgtttcagcagcattagaaaagcaagacagaccccacgcttcaggcaagggcaatagttacttattggcggcttcacaaattccaggaactgagcttagctatctttgtggttcaattcaccggagtctcaaaacctggcaggtgttatcatcttcctgaggcaccgagagtcgggactgccagaggcctgcacagcctccagcacacgtagccccgggggacaagatcagagcctggaacagcccccagctccagcccctccaggtcagaccctcaggggtcttcctgctgcttcccagccttgacaaatgggaactcatcccctgtgctgggggctagcactccctcctgttccctgccaaccaaggttttgcctgagggtttagcaaatgccacaccgtgagctgtaactgtagagctggttggactaggatggggggaagaaagggatttgcagccccagccacaaacaagcttcatcccccctggcacgagcatagaccctggaagccctgtaatcgcccatttctgcaagatcctcccctcaagacttccattcatagtccactcttgaaaggctggttctgatgggaagacaactcaggaagaccctccctcaagaggcaacagtcagccccaagagtcctgctctgggccccgttcacgctgcagttttggctgagattggagcaaaggcgttggagagcgtacggatgggaaattagcctcggtgcacttggctaacaggagacccgttgctcagtcaccaccaaaggaaggcctgttccatctcccatcttttccagctttcctcagactccacaattcccagtttagagccatgaggaaattcacattgtttcttcagtctttgcagggcgtctcttgtctcatcaaaaaccaggctcaccactcactcacccattcccaccgggagccaggcactgggaatacgaaggtgaaggagaggtgcccacgtgcctagaatgctccggagcgagttctctaaagagttccaggtcccacagcctctgccacgctgcctacctgtctccagcaccgggaagctgcctgtcctcacttcctcccagccagaacttgtgaaatgcagtcctggtgggttcgtttatcctcagcatcctgcacaatctgctaggctgacagtgtggcagcttgaagccgccaaaccaaagacgtcaggtcactctggtaggaacaatgtctagagataaggcgtggccagctcaggcctggtcctccacagagttgagaggctaaataaagcctccaaacatctggttccaggccaagcaaagacacaatctctccagtagcactggcctccaagacaacaagcagggctggctctctggctgcgactcaaggctatagggcatgcagcgagggtctgaggcttcacagacggtagaagtcagttcacgggccacagctggctgccaggagtacccagcaggatctgctcagagtagatgccactgggcctgggggtgggggtggccgtgcctggggcttatacccacaccaagcatcaacctcaggacaactggcccatctcagtctcaggacagctgaggcagtgtagaggcatcgagagaccctctcctctcccagcgctaggcgctgaggaagtctctttcagctgcttccttggcagaatttagaacagagaagacgggtcaactgctgggggacaaagaccaaattccagtggcccctctctcctgaagggtggatccccgtattctgggctccctattgctgtctgaggtcttaggcaggcaccatagggcacaggcaatgttttgaaactttggttgttcatatcccacccttaaaattttgccatactcacataccaccacctgcactattctttactcaatattgttctttacagtaactttttttttttttttttttttttgagacagagtctcactgtgtcacccaggctggagtgcagtggcaggatcttggctcactgcaacctccatctcccgggttcaagtgattctcctgcttcagcctcctgagtagttgggattacaggtgcacgccaccacgcccagatactttttgtgtttttagtagagacagggtttcaccatgttggccaggctggtcttgaactcctgacctcatgatccaccgcgcccagtctcccaaagtgctgggattacaggcatgagccactgcgcccaagaactgacttgtaaaaagcagtcttaccctacacgtatttgaaatcgtaagaaaaatgtacaggtcatattttttctaatatatattaaaatatatacttaaccattaaaatgcaaaatatagatcgaggtgccaccgatcatttctcaaatcaccacgtggggcccgcacttagaaaaacatccaaatgggggatacaggcatgatgtgcaggcacaagagacctgggcaggtgaaacagaaatagagatgtttcagatgatccattaaaaactggcacagaattgggctgggctcagtggctcactcctgtaatcccagcactttgggaggccaagaggggcagattgcttgagcccaggagttacagactagcatgggcaacatggtgaaaccctgtctctacaaaaatataaaaattagcccaacgtggtggcatgtgcctgtagtgagggggaggctgaggtgggaggactgattgagtctgggaggtggaggccacagagagccatgattgtgccatcgcactccagcctgggtgacagagtgagactctgtctcaaaagaaaaaaaaaaatggcacagaatgatacctaaagggttaatctgcattacaaaagggtttttattcctgacaaataagttccttaaaatagcaccttctacaacgcccccgtcacaaccctacctatctttaaatagaatggcatgaaacatttttggcaagtgtaagccattttacaaatgcaacatgacgctgctatcagtattttatttgcattaccagttttacagatcaataactcttcaaaggtaagtctgggctgagatatgcagcaaactccagctatagctttggagaaaactgcagccaactttacctctgccccccaggaagatgaagcgtcttggaaatgacactggaaacaggattgatttatgggcctggcacttgggcacatgctcacaacgcaactgctgcttaaggtaagtacccctaaagtaaagtaatagcaaagagaattgccttggattcctactagctgccagggaagggtgtgccaagaacctctgcagcccaggacaggagtgtatcatccagaaatgacccttggcctgcacacacacacacatgcacgcatccaggccatccccaactccactagaagtggtcccttctcccctgaatttggtgcccttttatcagtactcttctcacagtcttttttttttttttttttttgagactgagtctcaccctgtcgcccaggctggaatgcagtggcatgatcttggctcgctgcaacctctgcctcccaggttcaagcgattctcctgcctcagcctcctgagtagctgggattacagacgcccaccactacgcccggctaatttttgtatttttagtagagatgtggtttcactatattggtcaggctgatctcgaactcctgacctcaggtgatccgcccacctcagcctcccaaagtgctgggaatacaggcgtgtgccaccgcatctggcccaccctgcctacttccgtactctattcctactccctgtacctgccccttgctctgaacgccttgtgagggaagatcacgccttgttcctcttgtcatctctacagtgccaggcagggtgctctgaagagcacctaacctgagagtgtttgttgaatgaatccaggagctttcttcccaccgctctgtggccacctgcttgtcttctccctctgaggccaatgccggtagaggagggaggaattctagaggtgttcaggatggagcagggagcctggaactccccggcattcgagaaaggtctccttcccccatgctggcagcaaagtagaggggaagacaccatcccggtgctcacggggacccaggaggagcagcgttttcaggtgtgacacgtgctcaggctctcttggcatccgtgggccaccgccgtacacagcaggacacctctgagatggagcgaggctgggaacctggtgcacccttcgtgggccccagcgggcctcacacattgtgcagactctcacaggcaccagccccacaccaagcactgtgcagtgttcagcaatgaatatgacatggtcctggtcctccaggagaatgggatataattgcggaggcaaatgtctagagttctgagcatctgagcagaatgaaatacgggcttagctgaggcatacgccggggtccagcagaaggggaggtccaggaggcagcctctgagtgggcccacatctgtgctgggggcttcccagaggaggcccatgagggccacacacctcccatcccagcattgctactcccagcctgactcctggctcaggagcagactttcccaccctgttcctagtggggaggctggtcagaccctaagtgcagaggcctccctgagcccacggggagacgtgacttacccccacggccctacgccagcaccagatcagagaagacagggtggggtgccagccactgccagcctccctacagctccactccccacccaggcctgcagccaccgctccacccatactcacacatcagccatctcccgtggttctgcatctatttttacctccattggctcctcctcagagccacactgtagagtgggtggggcaggactgtgatccccatcttctgtgaggggcagggaggcccagagaggttcagggacagcctcccgtccccagcaatgctggctgcacatgccttctaggccccgccgatgggcactcggttaggcagcctcgcctagcagtctgcaaactccccgaaacgcatcctcactgggcctcccttctcgacacagaaccagagagcagctgagcaaaaggctgaggtggaagctctgagaggtgtgtccaggagagaaaaaggaagaccgctgtggtgtgccgggccagactcacagagccggcgtggttccggggccgccccgctcctcaagggattctggccaccactgccctccagttccaccgggagccaacctctcctacaggacgggtcactgctgcagagaacgccgtcagccccagagcgggtgggccagggcccagcagatgctccctgcctgtcccgcctcgggaagggcacctgcccacctggctgcagcctccaagccagctgttccctccccccttcagctgacccagtgcttttccttcaaggaagctcagtgacctctggctcttgccctttgcaaacaccctcttgcctcagctcggagacaccaagtccctgtctcctggctgggaagagggtggcccctctcttgcggttgccgtggaaacgggggattcctgcccacccgctccagggaggcggcgaggctcgggctgacaggcgcgccaggtgactcctggcacagccgccggagccctgagctgggctggcctggagggggcggccaccactgccccgaggacaccggtcggggaggcaggcccgcccctctcccccgggaacagctgccggggccgggaccctccgccgagggcttccacccggccgcgcgctctgcgcccgcatcagccatttctcccgcgcaccttcggcagcgccggcccggccccccccagcgcccagggcgtgtcacgctcccaccttcacagccaccaggaagggggaccctgagccggggctggtcggggttcccagctcgcactcctccaggagaaacacatcttcgtcctccagaaccttgtccagcaagcctatcgcctcctcttcctcctccatggcagccggagcccgcggagggcagacaggaagcggggtccacgcagcggcggcgggaggagggaggagggaggaggcgggcgggagggggggcaggtctacacccgcgcgcccggcctggggctcccgacccgggactgcatcccggacctagtccagcccgctccgccgccgccgccgccgcctcgcgcgtcctcgcccggcgaaagggggagcaaggcccgggcagcccctgacgccgtgcccggcccgtggcggaggcgaacccgccgcacagcagcccagcgccctcctccgtgtcccgcccggccccgcagggcccgcccttcccgggctccggggctcgggctcgcgctcgctccgaacacacaggaaacgcgcgtcgcgaggtggagccgcccgtcctctggggttgcggggccgcggctggcggaggcttctgcggcggaggaggagcgaggaggccgcggccgggccggggtggggtggagcggggaggccgcttcccagacgcatcttcattccccgcgcgcggccgagccaggagcccggcgagcaggggcgacccccagagccaccccggagtccccatgcgccggagcccccttccggaggggaggccccggcccgcccagaagccacagccgcgtcccgccgccgctggaggagtcaggctttgcaacagacaggcctgacctgcccccaggcaggagcgcggcgccaccactgtcctgcacaggagcggtgggcgtcccactcacagggaccaggatccccctcctccaagcagcccccctcctccgagcagtccccccactcacggacgctactgacaccagcacccccacctcctctgagcagcccccccactcacagaccagcccccctactcacaggcgctgcagagaccaggacccccacctcctctgagcagcctcccacctactcacaggcactgctgagaccagcacccccacctcctccaagcagcccccccagccaccccaccgcagggagccatcctgcaaggggagtgcacacagaacccaggacaggcaccatctccggccctgcccactcccagccagcttcccctggcttctccaatggttgcagaacccccaactgtgcagggagtgaggccacattctggtccccctggccctagttcccagatgcacatacacctccttccatgggaggaggagtccagaggaggccctgggaaaagctcttttacaacccaacgatggagcaaaggttgcaaacggcacccatgagggtgcgggtgaggcctgcgggtgaggccagccggtgaagcgagccaggtagggcagggtgaaaccaccactcactccagccgatggctgctggaggaaacgcaagctcatggctgcctgatctctgttcaaaataagctaaaatctggcttattaacaggaatgctcctgattttaaaacgatggcaaataattaacattttaaaacaacatggtgccgtctaaatgaaccacacctgtggcccgagttcaggccacagccccccactccccccagaattcttcagaagctctgggctctaggtggggctcatgcaattccattggcagcagagaagctgccctccctggagagaggctccatcctgttgcagagctgaaatacagagcaggggattgcggggtgagcccttgaggggccccagggctaacagcctttgatcagggaactgtgccaccagggttcaacagaggcacacccccaccccacccatctccttccagcccctggttttcccctgtccctgcctgggtgggttataaatagccagggcgcatctgaagggccctttcagccacaattcctcatttggtgcgggcgggtgaggctgtggcgagggcttgggaacgaccaggcctggcattccccagggcacaagtatgccagctcagggcctggtaccacgggttcttctgtctcccgcccggcgggctccaagtgcatggcatgggctgcccacatgagtcagacctgcaggtgacacgaagaagggcctaaaaccccacaggcccctgctgtgttccttcctccactcaagaggacatgaggtgcccttggaagtctgccaggatatcctcgtccccgttccccacacctctacacggcatggtgagactgacgcccacttcttcccaaaatccctgaaccccacacaagtgactccctgagtatccagggcctctctactccaccctgtccccggtggctggaaattccagtgagtaatgagagtgcccctccatcagacacagactccactcacaggccctcggtgcccccctggaggggaagtgactcaccagtccccacagcttccctccccttccctgacaaatgccctgagccagccctggacctgagctccacactccatctgcctcggcctggctcctaatgttctccatagaagcagcctgcttcaaaggcccccccaaacggtttattccaaagccagaggcctccctctccgactctttggcctctgcagtctagagtttctccaagccctcagctgccctgttgatgcaggcactgccccgaccactctctggtgtaggctggcccttcattctcccgcctcctgtaaatgtggagtcacttgcttgggcccagcctcagccctctgctcccttcccccagagaagcagcccttctcccttccaggccagtggtggcccgctgccagctgcagccctggtgtcttgctgggctctaggtctagcacctgccccggccactgggtctcctcacttggaagcccagccacggcccttccactccacacatctggaccaaaggacccttcctccttctgaaacagcttccccttccgggtttccacttctgttagtgcggccgccatcttacgagtcttccttccctcaacccccacatcccttttaccaagtccttcggttcttcttttcctttgccaaagccaccaccccaccaagctttagagcctcttacacccacacgaccacacgtacttccccactttggctcctgatcttgtctgtccatctgtctgttcattcattcattcatacccagaaaaggcctggcatggcacacatacgaggctgggagacggggcccttgccgttctcaggctctcgatccgtctggggtgaggacgtgtgaacacacgaggcagtgttctcgtttaccagccaccctggggatggaggacagtggcactaacgctgcctgagagtgaaagcttcacaggacagtggcttctgagtagcatctggaaatagggaagggtttccaggcaaagaagagaaggcccgaaaggaaagggttaagcagcttcagcaacccggttgcagtggcgcacctgaaatctcaggtactcaggaggctgaggtgggaggatcgtttgagctcaagagttggaggctgcaatgagctatgatcgcaccactgcactccagcctgggcaacagagccagactctgtcttgagggagggagggagggaggaaggaaggaaggaagagaggaaggaaggcaggttaagaagcgctgcttgctagaggacagaagatgaacttggagaagtgggctgaacagcatcatggagggtgaggggcataagcacacaccacacctagctactgtttgaaatctttcgcagccactgagatttctgacaccatcaagtctaaatctcagtctccaatggttgactccccacagtcttcccccacacccaccctccattccctccttccctgacccaatcagcaagcatttgttaacgcctgacccaatcagcaagcatttgttaacgcctgacccaatcagcaagcatttgttaaccacctgacccaatcagcaagcatttgttaacgcctgacccaatcagcaagcagttgttaaccgcctgacccaatcagcaagcatttgttagccgcctgctgtgcaccaggcagtgtgctagcatcggaatgcagccatggacagggaaccccgtgcctaccctcgcggagctgacagtctcagggacagattgacctggtgactgactcccaaggcagtgtcaagggaggggcaaggccgtactggggaggggagcagtgtcagaactctgcagctgaggtgccacttttctggaagggataacatggaaacacctattgcgattttttttttttttttttttttttttgagacggagtctcgctctgtcacccaggctggagtgcagtggcatgatctcagctcactgcaacctccgcctcctcggttcaacccattctttcgcctcagcctcccaagtagctgggattacaggaacccgccaccaggcccggctaatttttgtatttttagtagagatggggtttcatcatgttggccaggctggtctcgaacccctgacctcaggtgatccacccgcctcggcctcccaaagggctgggattacaggtgtgagacacggcacctggcccactgcttatttttagattcgactttaaacgtcacctcctccagggagcctcccgtgactccccgttggctgcgtcagatgtgcccgctggtgccctcagagcccactctacgttcccaatcgtggcacttctattttaacttctttattttcctgttacatcactaacaattctaactctgtagacacacataataaagaaagagaaagtctcctctggttccctctgacagagggagcctctaagagttagttatacatttttccttatttgtgtccacgaataaactatacatataggccgggtgcagtggcttacgcctgaaatcccaacagttcgggaggccgaggcaggaggatcactcaagcccaggagtttgagaccagctgggcaacatggcaagacctcatctctataaaaattttaaaaaataattagctgagtgtggtggcatgctcttgtggtcccggcttcttgggaggctgaggcaggaggattgcttgggtcaggatattgaggctgcaatgaactgtgtttgtgctactgtgttccagactgggccacagagaaagaccctgtctcaaaaaaaaaaaaaaaattaggctgggcgcagtggctcacgcctttaatcccgcactttgggaggccgaggcaggtagatcacttgagttcaggagttcgtgaccagcctggtctacgtggtaaaaccctgtctctactaaaaatacaaaaattaaccaggaggggtggcacaggcctgtaatcccagctactctggaggatgaggcacaagaattccttgaatccgggaggcagtggttgcagtgagctgagatcacaccactgcactctagtctgggcgacagagcaagactctgtctcaaaaaaaaaaaaaaaaattatggccgggcgcagtggctcacacctgtaatcccagcactttgggaggctgaggcaggcagatcacctgaggtcaggagtttgagaccatcctggctaacacggtgaaaccccgtctctactaaaaatacaaaaattagctaggcgtggtggtggacgcctgtagtcccagctactcaggaggctgaggcaggagaatcgcttgaacccaggaggcggaggttgcagtgagccgagatcgcgccactgcactccagcctgggtgacagagagagactccgtctcaaaaaaaaaaagcagtggttagagatgctggtggggctggggaacagacaggagagagactatgtgaggcacaatgacatgagtttagtctggctggttcatgcattcattcagctaatatttactgagcacctactgtgtgccaggcacagttctcggcaccagagactgcaatgagcaagttttgttacaaaaccgacaaaatctctctctcgtgagagttcacaattctagcacggagttggtcctgaggccacagaggtaggcagggggtccaggggtcaggtcacacaaggccttgacagctgtgcaaagggaaggggggccccataggcgaagggaaggtgctggaggatttcaggacaggtgtgacaggacattcatcctgcatccctcctgctgacatcagatgactctttctaaaacactgctcactctatgcccagcaggaagccaccaagccagcccaaacaagagccgtggggccccagctgatgactcacccatctcactgttgacagtaacctctcaaagggcctggcacgttctcacttccaggcctttaacaacggcaggtcctcggcttgaagcactttctcccgcctcttggcttctccctggctctcccagctttcctggcagaaactcaagccccacctccagactgtatgaagctcagtagctcttcagccaatgggaactgacaccaaagggcaagtgccagggcagttgcagccactaactgcagccacagatgggactggattcgtcaccttccagatcaccttgctcctccctctgcctcctctctgttctagtacaggtcactccaaaatcatatacatagttcaactacataaagctaatgttggccagatgcagtggctcacgcctgtaatcccagcactttgggaggccgaggcgggcagatcacctgaggtcaggagatcaagaccagcctggccaacgtggtgaaaccccgtctctactaaaaatacaaaaaattagccaggcgtactggcgggtgcctgtaatccccgctactagggaggctgaggcagaagaatcacttgaaccccgggaggcggaagctgcagtgagccgagatcacaccactgcactccagcctgggtgacagaaggagactctgtctcaaaaaaataaaatacataggctgggcgaggtggctcacgcctgtaatcccagcactttgggaggccgaggcgggcggatcacctgaggttgggagttcaagaccagcctggccaacatgatgaaaccccatctctactaaaaatacaaaattagccggatgtggtggcctgtaatcccagctacttgggaggctgaggcaggagaatcacttgaacccaggaggcggaggctgcaatgagccgagattgcgccactggactccagcctgggtgacagagggagacgccatctcaaataaataaattacataaaataaaataaagctaatgttgaggagaagccggtacacaacactgtttatacagtgaaacaaataaactaaaacagaaagaaaactcccctgcactctggatgtgagccccagctctgcctcttgccaactgtgtgacctgggcatgtcatctagtctccctgtgcctccgtttcctcatctatagaatgggggtaattacggcatcaactctagggctgctagctagccagaagacggagatcccagacagggcgtgagagctgtgggatgagccaggccagccaggtgtggttcatcagggaagattaacagtatgcagaggtgagcaagatcccagccaggtgtgaatgtaggagggccagagaggacgggagccagcgatgacgggacccagggtcacaaccaaggcactagtctacctacttccgacttacctccttcccaactgggacaagcccaggagccaccctgagcctcagtgtcttcatctactaaacgggggcagccccatggctggaggacttgggtggcagggcagcccctgggctcctagcacagcacctggcacacgggagggtccagctcgtgtccttctctttgcagcagggacccaagatccaggaaggggagaaatgcaggggccggctgctggggggcggaggctgaaactcgaggagtccctgaaccacacaacccaggtccggagcagtcaggagggagtggagcaggcaccatctcaggagttcctggctgccatgccgcctcttcacgcacctaccagcaacctcgaatcccaagccctaagccttctgaagagaccaagaaagggaagaagaggctgcagttcctcccagcgttatccctgagcctgagttcctcccagcgttatccctgagcctgagttcctcccagcgttatccctgagcctgagttcctcccagcgttatccctgagcctgagttcctcccagcgttatccctgagcctgagttcctcccagcgttatccctgagcctgagttcctccccagcgttatccctgagcctgagttcctcccagcgttatccctgagcctgagtcctccccagcgttatccctgagcctgagttcctcccagcgttatccctgagcctgagttcctcccagcgttatccctgagcctgagttcctcccagcgttatccctgagcctgagttcctcccagcgttatccctgagcctgagttcctcccagcgttatccctgagcctgagtcctccccagcgttatccctgagccggagttcctcccagcattatccctgaacccgagttcctcccagcgttatccctgagcccgagttcctcccagcattatccctgagcccgagttcctcccagcgttatccctgagcccgagttcctcccagcgttatccctgagcccgagttcctcccagcgttatccctgagcccgagttcctccccagcgttatccctgagcctgagttctccccagcgttaaccctgagcctgagttcctcccagcgttatccctgagcctgagttctccccagcgttatccctgagcctgagtcctcccagcgttatccctgagcctgagtccctcccagcgttattgcctgagcctgagtccctcccagcgttaaccctgagcctgagttcctcccagcgttatccctgagcctgagttcctcccagcgttatccctgagcctgagttctccccagcgttatccctgagcctgagttcctcccagcgttatccctgagcctgagttctccccagcgttatcgctgagcctgagttcctcccagcgttatccctgagcctgagtccttcccagcgttatccctgagcctgagtcctccccagcgttatccctgagcctgagttccccccagcgttatccctgagcctgagttcctcccagcgttatccctgagcctgagttcctccccagcgttatccctgagcctgagttctccccagcgttaaccctgagcctgagttcctcccagcgttatccctgagcctgagtcctccccagcgttatccctgagcctgagttctccccagcgttatccctgagcctgagtcctcccagcattatccctgagcctgagttcctcccagcgttatccctgagcctgagttcctcccagcgttatccctgagcctgagtcctcccagcgttaaccctgagcctgagttcctcccagcgttatccctgagcctgagttcctcccagcgttatccctgagcctgagttcctcccagcgttatccctgagcctgagttctccccagcgttatcgctgagcctgagttcctcccagcgttatccctgagcctgagttcttcccagcgttatccctgagcctgagtcctccccagcgttatccctgagcctgagtcctccccagcgttatccctgagcctgagttccccccagcgttatccctgagcctgagttcctcccagcgttatccctgagcctgagttcctcccagcgttatccctgagcctgagtcctcccagcgttatccctgagcctgagttcctcccagcgttatccctgagcctgagttctcccagcgttatccctgagcctgagttctcccagcgttatccctgagcctgagttcctcccagcgttatccctgagcctgagttcttcccagcgttatccctgagcctgagtcctccccagcgttatccctgagcctgagtcctccccagcgttatccctgagcctgagttccccccagcgttatccctgagcctgagttcctcccagcgttatccctgagcctgagttcctcccagcgttatccctgagcctgagtcctcccagcgttatccctgagcctgagttcctcccagcgttatccctgagcctgagttctcccagcgttatccctgagcctgagttctcccagcgttatccctgagcctgagttcctcccagcgttatccctgagcctgagttcctcccagcgttatccctgagcctgagttcctcccagcgttatccctgagcctgagttcctccccagctttatccctgagcctgagttcctccccagcgttatccctgagcctgagttcctcccagcgttatccctgagcctgagttcctcccagcgttatccctgagcctgagttcctcccagcgttatccctgagcctgagttcctcccagcgttatccctgagcctgagttcttcccagcgttatccctgagcctgagttcctcccagcgttatccctgagcctgagttcttcccagcgttattgcctgagccttccttgctcctcccttcctcctgactgaacatcccagaactacttggttccattccacaaataccagttgagaacccctaggtgccaagaagcttccactggggtccacagagatgatcagggattaaggtcctgatctcacagggcggatgcaccccacaagtgaccgtgcacacctcccaaactgcagtaggatcagcggcggggtgggtgtgaaagcttcacaagggagggcgtgtgagcgggacctgacagcgctgtgcaggctctggcatcatagaaacccaagtttcaataacacgctgccccactggctgcatggtcttggacaaacaataatattaatagctattattaagagatggagtcttgctctgtcacccaggcggggtacaatgcctattcgcaggcgtgatcctagcacctctcagcctccaactcctgggctcaagcgatcctcctgcctcagttccccttgtagatgggattatgggagtgaactaccatgcccagctaatcttaggcaaattacgtcacctctccgagccccagttttcgcacctgtaatgtggagatggttatagcacctacctcatagagttgttggggctcttaaatgaaaccaacacgtgaaaggttcagcacaagcctctctaagcagctgtgatgagggggaggaggaggaagaggatgatagggacaatgatgatgattttttttttcctttttttctttttcttttgagatggcatctcactctgtccccctggctgctggagtgcaatggcgtgatctcagctcactgcaacctctgcccccactgggttctagcaattctcctgcctcagtctcccaagtagctgggattataggcacctgccaccacacccagctaattttttgtgtatgtttttagtagagacggggtttcaccatgctggccaggatggtcttgaactactgatctcaggtgatccacccacctcggcctcccaaagtgctgggatgacaggcgtgagccaccgcacccggccaatggtgaggatttcaattcgcctccacccttatctttgggttctcctgcaggctggagtctaatcccctgtttcgattttacattgacaaagcattctgccaaacaccatctcacagaaacctcacaacagctgtgaggtttgagccctgtgaggtcaggagggaggaaattctcagtgtcttcacactacagatgagcaaactgcagctctggtggggagtcatgagtgacacccctcaggccacacagtgagacagtggtagagtggggacaaaacccagttcttctctctgccttgtagcccctttttactaagcttcccaagaggcaagcagacagaggagtctgtggcctgtggggaggcgggttttctgtaagaccatggtcctgccttaggaacctacacccccacttgtcagctgagatgagtcctggccctttcttctcagagtgaaactgggcagtctccgctgaatggagccacccgtggtctgtgggcctggccctgccgtgctgccctgctcagcctggacttgggcagggtttatggggcagggcttcaggtttcaccctaatacctctgtgggatccatgtcttggggacacaaaagaagacaaaggcagagtgcaaggctgtggaagggcgtgctggggagagaggagcatgtcctgccaacaccgcagagacccggcttcacccggggccaccccatgtggcagaaaggaggttgattgcaaaagcaggttcggtcatggtgcagcagatattgatcagacttggtctttgcagtggtaatgctgttggctccccagccctctaaacctggcgagaaaagtcttgtgggccctggtggccaagggctgtgcactttggtgagccaggcctaatgctgcaggcctcccctcatgctgaaattccgcagcatcttcctgcagctgctcacagtgggatgggagctgagtccccccaggcagggctctgagccctgctgtggtctgagagctgctcacagtgggatgggagctgagtccccaaggcagggctctgagccctgctgtggtctgagagctgctcacagtgggatgggagctgagtcccccaggcagggctctgagccttgctgtggtctgagagctgctcacagtgggatgggagctgagtccccaaggcagggctctgagccctgctgtggtctgagagctgctcacagtggggcctcctccccactacctttcaggggagttagagctatctagagacaaggagactgaggctcagcggtatgaggacacttgcccaatgtctcacagctaaagagtagattttcttttattttcttgagatggagtctcgctttgtcacccaggctggagcgcagtggcaagatctcggctcgctgcaacttccacctcccaggttcaagtgattctcccgcctcagcctcctgagtagctgggattacaggcatgtgccaccacgcccggctaatttttgtatttttagtagagacagggtttcaccatgttggccaggctagtctcaaactcctgacctcaggtaatctggctgcctcagtctcccagagtgctgggattccaggcgtgagccaccgcgcccagcctgagagtaatagattttcatctgcgcaaagcttatctgctttccatcctgggtggctgaaggaataatagtatgacacttcattttctaggccaacctgactaggccacaaggtgtccagatacttgtccaaacattaatccggacatatttgtgaggcatttgggatgaggttgatatgtgtattggtggactgagtaaaaagactcctccccagtgtaggtgggcctcatccaatccactgaacacctgaattaacaaaaaggcagaataagaggaagctcctctcgcctgactacctgagcgtgagctgggatgttggcctcctccagcctccagactcggactgaaacactggctcttcctgagcctcgagtccactggcttatgagctggaatttacatccctggctctcctagctctcaggcctttggacttggactggaaccaatattggctgtcctgggtctccagctattgactgcagagattaggacctctaagcctccataatcacctgaatcaattccttctaatacttttcttcgtatgtagatatagatacagataacgcacacaccctgttggttttgtttctctagagaacactgactaacacaaagactcaaccttgggcttcccgttggctgcatatttgggcgtggaaggcccagcgataaggcggtgccagaagccagatatctgaatatctacaacaattgtctgatttggtccagaagtcccccctgttcccaaggccccagcaggaagcctggtaggggaggggacctgtttggccaaataagcacagccaagccgcagaaacctcggtcttttattaatagtgtttttaaccaaaacatccccaagtactcaggaagaggcgtcagctccctccaggcaccccgtgtaaacagcaatccctgcagagtccactaggtggggccggtgacccagcagaaagggcagaaacgctccctgaggagggaaggcaggtgccgcggatgggacctttgcccggacgatccccaggctggacaagtgctccctactcctgccttgcgtggcttctagtcgatggtgtaaacatcaaccctgggggccacaagcactttagggggcagtcactctagcatctctggatttcaaggtcctcaagccaagtgagtccctcgtgagccaccaagcaagacgcacagccaccaagtcaagttctgccccgaagccccggagcgccaggcgggggcatctgtgcgtgacgcccgtgatctgtctcccgagagaaggcacctgccagcaccaaaggaatcggaaaatcgacggacacggaaaccagtcatggtggtcacgcgacaaggacagggcacagggacagggagcaaagagggaggtggcgcggggacaggcagcggcaaagaccctggccccacaccgggattccgcagcatcttcctgcagctgctcacagtggggtgagagctgagtccccccgggcggggctctgagccctgctgtggtttgagagctgaaggcagagatgggagcgagagtcttctcctccttgctctcccctggttggcccccgttcaggtccctgaacacctgctctgcctccttgggttactatttgtaccctgagcccaatgcctccaggagaaccagggcaaaaaccctgcccccgcaggtccgagacgcttgtctctaacccgcctcccgtcttagggcaggtcaacaacacactgaccaaccccctcgccggcccccttgcctcccacctgccccccgccagcccttcccacaggtgcacgcctggactgccgctaaactcggcctcggcctctgttgccatggcagcaatgtggcttcccccaagtgggaagcccgttgccaaggcccttgttgccaaaggctataacagccaccccggtgtgtgaagaggggtgagagctctgtggggggtggagggtggccgggggggctggaaggagcagggggttctcaagaatgggagggttcaggcggcctcagctggggtgggggggcactagcccctggaggaagaagaggcagcccgtggcatctcagcgactgctcctctggggacgtcagaaggcaggacggagaccccctacaaaacacacccggacgagcaggaccaagcaaggatggggcactcccaccgcctcctgcaacacacaccccccacagaggaccggcttggattcttctcccccaccagctccaggcaaacaacccccagaacctctgttttgctcgttcatgtgtctccgacaggcacacacgagctgcgctcagacagcgtcagtccctgtcgccaggaacacgttaatgacaaggaccgcaaaccctccacagtttctatccctggcctgtctcagagcacatacttaatattccttctacaatgcttctctctggagcagaactcttgtctctgtcaacaaggagaggtggatgccatcagagtttgttcccttccagagtgaacagaggagggctggagcgggcagctcattgcacccacagggagcaccaggcccaggctggctttgcgggagcagcatctgaacacctggagcccacgggccacgcatgcagccactgcctggcctgggtgcagaggggaggagagcctggtcctctcctgggtcctctggaggagacaggctaacaggggaaagctgaaagaggcacggaggggtctgggaggcctggggagcagacggctagtagacggggagagacaggggcggcagcgttggcaaagcaggtggggagggaagcccgagcctgagaggggtccagggccaggacgagatgacgaggcaccaagaacggccaggtccaaacgtctccagtcccaatctctcgagaccaacccaagcagggcctggcccacgatgcccaggccttcccgtcacccctccccaaacccagaaagaaaagccggtgtacctaccccaggagccagtccctcaggtggagtcggggagacgccatcccccccgccctggctgcgggcgctgagctgcggggacatggtgggcgactcatcgatgtacggcatggtctctgagccctccgggggccccttctgctcctcattcccctctccgtcgtactcgtccgtcccgtagctgaagtctgagacaaggaacaagaaaggccactgagaatcctccaccagagctgccagggactggtagcgtagtgggcgccggcggcggcccccggcagccatggccccggccgcaccatccacgcctggcccgggcgggggctgtgcgggggcctgggcctggtgaggggcgggggagagccagcaggcaccgggccctgcccgctccggggctgctgggaggcggggaggagcggctctgctgttgctacccgatgaagagcatgtcagccgcgtatttcaagctgctgttttctttgccttctgcctaattccaagtgtaaaaattaacagtgggagcaagaggcaggacgcttccaactctcctctctgagtcaccattttgctttttatagggaataaggaggtggggggggccggtcgatgtcacttcctgtggccctcctccttgggtaccatttgtactgagcccactccctccaggggtccagggcaggttctggagtgtgggaggggagccctcagccctcagaacaaggccccgcacggaggacggagcccaaggcagcagggcgtgggcgaggaggctgtgcccaggcctggcagggacaggggctcacagcagactcctcggagccggtgcttatttctatcaccccagtgtgggcttccttcaaaggaggagggaaggaaaggcgaccgggaagttgagccgcattaaccccccagggctgccagcaccacttgggctccagagcccaggcacggagcccacccaccttgggaggggaggctgagccagtgcagcgagcggggtgtgcaggtcagcagctcagggcttcacattttccaaaagggttacgagggcggcctcggaaaggcccctgcgtccagccccaccagcatggctataggagggaccctcccacaaaccggcccctgccccttggcctgtttgctccccagctctgacccaccacgactggcaacggagaacgtggcagtgttgctcccgagggctgtggtggacctccttgggctggggccgccagcggggggtggacacccctctcacactcatcgcagagcaggggtaagcttcagcactcgtgcgggccagcgggagctggcaccgcagggcgtcctggagacacgaagatcaccgtgccggcagccttggggccagcaggagcctcctacgcactggactgcccagtggcggcgtccgcttgttaaacctccccgggtatcttccgggcgggactccctggccaggcatcttcggatctcgcacagtgtgatgggggaggctggctgagcctgccctgccatctgcccagacatcctttcctccaggtcaccctccccatggcacctggccccctggcaccttagtgaatcctgcccctttgtccttgagcccctggggcaggaggtgagcatctgagtcatcactgtacgccagcacccacaaccccacctgtggcaggctctcggggaaagtgcgtggagcgaatgaatgagcagaggatcgcaccgtctgtctcaggtctgaggcttcagccaagtcccagccagccaagttctccacgggggccccagctcttccctcctctgtcacaacacaccagcccacaggcaaccagcagctggagaatggtgtcaacaggtcaccgggacgcctggccgtggccacactctgcccaatctggccttttggcagccgagcgcttcccctaggctcgctgcacctgcttctgtcggctgcctctcctcgtccctgagccaatgccccattcagctgccaggggacatggactagttttttccctagacagggttgtgtatgaagaaccacaggacccagggatgccccatcactgagatgagtgtacaccacacacccgggcaggacccagggatgccccatcactgagacgcgtgtacgccacgtacctgggcaggacccaggatgccctcccactgagatgtgtgtaggccacgcacctaggacataaggcccagtgccctggagaccatgacacttgtgtctgtggctgaagggatgtgaaatgactctggtccttccagggggaggaggaagaggcacagcggcacccagctggcctgagtctgggtccgtgaagggcctggccgtttggtgacaccccctcactctggagaagcacaggaggggatggaaggcagcctcccgccggcccctccctcctccctcctcctctccaggaggctccaggctgccctgttggtgcctggagtccagggaaaataagcaatagtggaccgcggctttgcccacagtttagattccagccggccaagcagactctcctgtacactgaccaattcccaggggtcgcaggaatggaccccacacacttgggagatcgtccaagatcaacgggggggaagggacggtagggaaggtctctgccagtctccccacatgcacagttcatcctgatcagagcagaggaccacgggccctgccatcccctgctccttccagcctggatgttccgcggggaggcagttcttatttttcccaatttacatacaattgccgaagatcacaggatcagaacccaggtctcaaatgccctccctttccctctgaatctcactccaaagaagtccccttccatatccctcctggttaaggggggctgaccatggagctgaacgcagggggcctgaggacagggtgctggtgggcggaggcccaggggcggcgaaagggctcggcctgcgaacatttccagggccttcccctttcatttctgcccccacaaaaccatgagagcccaggagactccaaccaggaaaaggggtacagaaaagatggggaaaccaatcctcggagaaggcaggaaccctgggggaggaagatggggacctactgagcacaggcttcagtctccgacggccacaggtgggtatgctgagcagacagcggcttgggcaccagatctcaaaaaagaagaaaaggcagacaaggcaaaggctgctggcagccaatatccatttccccgccgactaacagaaatcctactgtattcggagcggcagtgcacccagcagctagttcaaagacacctttcctgatggtgtgagccatatgattacgttctagacaacaagatgttacagggatatgtgtggaacttgcaggaagctgctggaagagactgatttagccgaaaggtacactatccacactgcccttgttcctccttctgttgctggtttggagagttgatgggatggctggagccccagcagccatcctgaaccatgaggtgagctgaggatagaagccaccactgaagacagctgagcagaaagctgggagtccaggtcactgagggcacagtggagcccaccccaggaaggtctacctcgggacgttttcacaagctgggagtccaggtcactgagggcacagtggagcccaccccaggaaggtctacctcgggacgttttcacaagctgggagtccaggtcactgagggcacagtggagcccaccccaggaaggtctacctcggggcgtttttacataaaagaaagaaaaagtgccaaatgcaatttgagcctctgttacttggtttttctattatctgcagtcaaacctaaggtaactgacccaggtgatcttccctgacgtccccgcttcggtgcttttcctctgactgtcaccgtccttctcaggctccttggtgaaatcttctttctctacccatcccttaaaaattgctgttcccatggaggggaacgtcacacactggggcctgttggagggtggagggcaaggggagggagagcattaggacaaatacctaatgcacgaggggcttaaaacctagatgacagggccaggcacaggggctcacgcctgtaatcccagcactgtgggaggccgaggcgggcggatcatctgaggtcaggagatcaagaccatactggccaatatggtgaagccatactggctacaaaaaaattagccaggcgtggtggttggcgcctgttgtcccagctacttaggaggctgaggcagaagaatggtgtggacccaggaggcggggcttgcagtgagctgagatcgcgacactgcactccagactgggcgacagatcaagactccgtctcaaaaaaacaaaaacaaaaacaagaacaaaaaaagattcatgcacttcagcaaatgttgggctccagtgagtgacatgctggagtgaagtgtacaactctctgcaacttactccgaaatacataaaaaataagatgggctgaacgcggtggctcacacctgtaatcccagcactttgggaggccgaggcaggtggatcacgaggttaggagttcaagaacagcctggccaacatggtgaaaccccctctctactaaaaatacaaaaattagctgggtgcgatggcgggtgcctgtaatcccagcaacttgggaggctgaggcaggagaactgcttgaacccgggaggtgggggttgtgatgagctgagattgcaccattgcacgccagcctgggtgacagagtgagactctgtctcgaaacaaccaaccaaccaacaacaaaaaaaccaagatggaatgatgatgttcagagggatggaaagatggacagctgtgtgataaagcaagcgcataaaaatcatcactgggaacgttagacagcaggtgaatgggtgttcactgtgaattctttcaacttttctgtgtgcttacaattgttcatgataaaatggtggtggtggcagggactggtactcgccagcttccatcaacctcgcatcaccttcctctcccgaattgtgttcctgctcccggaagaagtcaggtctgcagactcctgggcatctccacctttaggagcctcaaacgcagccttttcccaaagaccacacacgtagggaacctgggagccattctagatgcctccacattcccgcccctcatctcctgcactgtgaggcatccccgctcctccccaccctcaccaactcttacaaggacaattccagcaccctccccacagcagccgggtcacaaatcagaccgtgttgccccccattcacttagggacacagccccgctcctcagctcaaggccctttgtggtctgcacctgctccacctctccagggtcctattctcctgccctgtgacatcggactccttctagctccctgcggtgggttcagtagtggcccccccacaaggtatgtccagattctaattcctgggacctgggaatgtgaccttatttggaaaacattctttgtagatgtgaataaatgaagggtctcaagatgagatcattgtcgattaaccggtgggtcctaaatccaatgctgtgtccctatggaaagagaaagggggaaaacacagacagaagagaagacagaggcaaggtttggactggggctgccaccaaccaaggaatgcctggagccaccagacactgaaagaggggagtaagtgggaactctgccccggcagcctggggaggggctgggactttgatttcagacttctggtcttcagactgcgagagcatcgatttctgctgttctaagccatcaagttcatggcaatctctaatggcagcattaagccacaaatgcagcgcctgacacgcacacagctctcccctttgcacaccaaatgcagtgcctgccacgcacacagctcgcccctttgcacaccaaatgcagtgcctgccacgcgcacagctcccccctctttgcacaccaaatgcagtgcctgccacgcgcacagctcccccctttgcacaccaaatgcagtgcctgccacgcacacagctcccccctctttgcacaccaaatgcagtgcctgccacgcacacagctcccccctttgcacaccaaatgcagtgcctgccacgcacacagctcccccctttgcacaccaaatgcagtgcctgacacgcacacagctcccccctttgcacaccaaatgcagtgcctgacacgcacacagctcccccctttgcacaccaaatgcagtgcctgccacgcgcacagctcccccctctttgcacaccaaatgcagtgcctgccacgcgcacagctcccccctttgcacaccaaatgcagtgcctgccacgcgcacagctccccctctttgcacaccaaatgcagtgcctgccacgcacacagctcccccctttgcacaccaaatgcagtgcctgacacgcacacagctcccccctttgcacaccaaatgcagtgcctgacacgcacacagctccccctttgcacaccaaatgcagtgcctgccacgcgcacagctcccccctttgcacaccaaatgcagtgcctgccacgcgcagagctcccccctctttgcacaccaaatgcagtgcctgccacgcgcacagctccccccctttgcacaccaaatgcagtgcctgccacgcgcacagctccccccctttgcacaccaaatgcagtgcctgccacgcgcacagctcccccctctttgcacaccaaatgcagtgcctgccacgcgcacagctcccccctctttgcacaccaaatgcagtgcctgccacgcgcacagctcccccctctttgcacaccaaatgcagtgcctgccacgcacacagctcccccctctttgcacacactgctcccgtgcctagaaaaccctccttgctgggcgcggtggctcacgcctgtcatcccatcactatgatgtggggcatcctccaaggcaggaggatcacttgagcccaggagtttgagaccagcctggccaacataaggagactctgtctctatgaacacacacacacacaaagacacgcacacacacacatacacatatatatatacctctccttaccccttgtccacctggtgaaatcctgttttgccctcaaatctgcctcatctgtgccctctcccaggaactttcctgtattctacatattatgataatacttgaataccgaaagcactttttttttttttttttttgagatggagtctcgctctgtcacccaggctggaatgcattggcacgatctcagctcactgcaacctccacctgccaggttcaagcgattctcccgtctcagcctcccgagtagctgggattataggcatgcaccaccatgcctggctaattgttgtatttttagtaaagacggggtttcaccgtgttagccgggatggtctccaactcctgaccttgtgatccacccacctcggcctcccaaagtgctgggattacaggcgtgagccaccacacctggccaataaagcacttttacaagccaatgagaaaagatgaaaacctcaactttctaaatgtgtaagggaaatgaacagaaaatttaaaagagaactacaaatattcaaaatgcattaaaaagaatgttaacctcatttgtaatgaaagaaaatgtaaagttctatatagttttcactgttcgtgtcaaattggcaaggattttaagataataataacaatatccagagctgtcagggcataggtactcacagaaactcttggaggctgcctataactggcacaactttggctgggcacagtggctcacgcctgtaaccccaggtctttgggaggccgaagtggacggatcacctgaggtcaggagttcgagaccaggctgacccacacggagaaaccccatctctactaaaatacaaaattagccaggcgtggtagcacatgcctataatcccagctacttgggaaggctgaggcaggataatcgcttgaacctgggaggtggaggttgcggtgagccaagatcacaacattgctctccagccttggcagcaagagcaaaactccgtctcgaaaaaaaaaaaaaaagttggcccaacttttctagagtcaatctggtaactggtatcaaaaggtttagtggttggtacagtttatacccagcgtaataagattatgatctatgatactagttataaatgaacataaaaataaagttgtaagtcacagggctgtctgtaagtgtgaaatattaaaaacaacctgaattatgagactggttgagtcaattatggtttttctacaagatgggctgctatatagcattaaaaactatatggatgatgaatagcatcttatcaagtgcaaaaagagattaataacaataattaaagtatgttacaatgtctgaaaaaagtaaaaacatacgtgcatagaaaaaagactggaaggctacaacacaaaatcattagagccttccgattctggaaattttgaaaaaattaatgtacggtctctgcgctctagggcactggcagacacccgacacccgtcttcccttcttccttgcttactctaccctcgttttctaggaagtggcaacagaccagtcccaggcaagatacccgctttctctgcctctctcattaccaggaacggctgccctacaccattctggccactgagacccaagtgaagcatgctgggacctctggcaaggccctgactttgatgattacaaagagacattttgccttgaactcatgggtgatgattggagttacggtggctttactgctgccaccaggaacaggtcaagaaagaacagaggccgggcgcgtggctcatgcctgtcatcccagcaatttgggaggccaaggcgggcagatcacctgaggtcaggagttcgagaccagcctgggcaagatggtgaaaccccatctctacagaaactacaaaaattagccgggtggtgactcacgcctgtaatcccagcactttgggaggctgaggcaggtggatcacctgaggtcagaagtttgagaccagcctgctcaacatgatgaaaccccgtctgtactaaaaatacaaaaattagccaggtatggttgcacacacctgtaatcccagctacgcaggaggctgaggcaggagatcacttgaacccaggaggcagaggttgcagtgagctgagattgtagcactgcactccagccggggcaacagagcaagactccctctcaaaaaaataaaaattaattaattaaattaaattaaataaataaaagaacagagccatttccctcatgctgttcagctgagccacactaggaagagcctgtctcatttcctgctcatgggaaatacaagtccctatatattgggttttctgctgcttacaatgaacacatttccaaatgatatcctcacagcccagagaggaagcgagtccaatcagcaatcaaatctccgagatgctacgacagaggcctcaaaggcccggcaaggcggaccggagggtgtgggcaacactcggggaggggaggtggctggggaggctttggtgccacgctaaggaagacagttcatcgctgtggctgagagcagggaccctgcggtccggcagcggaggttccagcccacgctctggcacttcctaacctctctgtgcctccgaggagtgcctggcacagggtggctgctactaaatggatacgggtttagcaaatccgtgtgaaacgggggacgacacaggatcaagtgcacgggccgctgcgggggttaaactggatgacacgcatacggcacttagcacataggaagcacccaatccatctcagctgctattattactgttattaattggatcttgaaagctgtgtgggtgcctgccaggcgggtgggggacaggagcagagtttcaggcggtgagaggaggcttggcagtggcacccagtgggaaacagcagggcccctggaggggactataaatagccaggagggctagaacacagagtgagcagagggggagagggccgtgctggagaggaggcagggacttgctcctgagagcctcgtgagctgagccgagagccgtgcaggactcagtgaggatgggtgacctggcccatgatcctctgcaggctcttgccggccacatcattgctgaatattgctaactttattttttattctttttctttttgtcttttttttttttttttgagacagagtttcactcttgttgcccaggctggagcgacaccctccagcctgtcgcaagggtgatacagaggctgactgttaagtgataaacttattttctgcccaagaattgaggatgggaatgagagagggaagagcagctgagggagcccagccctgaccattattccaccaaagctgcatcaaaagtcttcagagaggccaggtgcggtgtctcacacctgtaatcccagcactgtgggaggctggagcaggcagatcaccggaggtcaggagtttgagaccagcctggtcaacatggtgaaagcctgtctctactaaaaatacaaaaatcagctgggcttggtggcaggtgcctgtaatcccagctattcggggggctgaggcaggagattcacttgaacccgggaggcggaggttgcagtgaggcaagattgggccactgcactccagcctgggtgacagagcaaggctctgtctcaaaaaaaataaacaaataaagtcaggtaatgtgattcttccagttttgttatttttgttttggttccatataaattttagcatttttttttttctatttctgtgaagaataccattgtttgagcattactcctaaagtccctgggatattcagaatggtcagtgagcactggtttaaagtcacccctgcactggcccctaacactagagtcagcctgtccttctgtcctttgaaacttcgaagccaggcacggatcccttttctaggatgaaagtcctacatatgtcttcttccaatagaaggctgttttgtctacattgaaaatctgatctgttttgtttttgttttgtttggttttgttgttgttgtttgaaatagagtctggctctgttgcccaggctggagtgcaatggcgcgatctcagctcactgcaagctccacctcccaggttcaagtgattctcttgcctcagcctcctgagtagctgggattacagatgtgcaccaccaggcctggctgatttttgtatttttagtaaagacagggtttcaccatgtaggccaggctgatcttgaactcctgacctcaagtgatccacccacctcggcctcccacagtgctgggattacaggcgtgagccaccgcgcctggccaaaaatctgatgtttagtgcggtgaccttcctttacagtctttgctacatcttctgcacaactggccgcagcttctccatccgtacttgctgcttcactttgcctttttctgttatgaaagcggcttctttcctgacccctcatgaacaaatctctgccagcttcaaactttcctctgcagcttcctcacctctctcagccttcacagacttgcagagtgcgagggccttgctctggattgggctccggctcaggggaacgttgtggctggtttgatctttatccgaccactcaaactttctccatatcagcagtggggctgtttcccttatcattcttgtgttcactggagaagcactttgaatttccttaaaacacttttcctgtgtgttcacaatttggctaactggtaggagaggctccgcttccagcctatcttggctttcaacaagccttcctcactacactaaatcatttcttttttctctctctctctctctttctctcttccttctctctctccctctttctttcttttctagacagtctctatcacccaggctggagtgcagcggcacaatctcagctcactgcaacctctgcctcccaggttcaagtgagtctcccacctcagactcctgagtagctggaattacaggcgcccgccaccacgcccggctaatttctctatttttagtagcgatggggtttcaccatgttggccaggctggtcttgaactcctgacctcgtgatctgcccgcctcggcctcccaaagtgctgggattacaggcgtgagccaccgagcccgggctaaactgaaccatttctagcttttgatttaaagtgacagacgcacacctcgaggccactgtagggttactcactggactaacttggatatttttgtgtctcagggaatagggaggctggagcggggagaggagagaggctgggaaaggctggtgggcggaacagccagaacacacaacgttcatagatgaaggttgccgggtccggtctgtggtgcccaaaacaatgacaatgctaacatggaggatcgctgatcacagatcactgtaacaggtgtcataacaataaaaaagtctgaaagatcgtgagaaccaccaacacgtaacacagagagaatgcgaggtggccacacacttccaactggtgaaaaaaaacgcagcatctttgaagctcaactaagcatggaggtgccgtaaagcgaggtacgcctgcacatgagtgccgtaaagcaaggtacgcccgcatcacaggagtgccgtaaagcgaggtatgcctgcaccgcaggaggctatttactttaggttggagcaaaggtaatatataatggtaaaaaccacaattactttttttttttttttgagacggggtctcactctgtcacccaggctggagagcagtggcacaatttcggctcactgcaacctccgcctcctgggttcaagcaattctcctgcctcagcctcctgagtagctgggattacaggtgcccaccaccaacacccggctaatttttttttttttttagtagagatggggtttcagcatgttggccaggttggtctcaagctcctgacctcaggtgatccacccgcctcagcctcccaaagtgctgggattacaggtgtgacccaccacgtccagctctcaactacttttgcaccagcctaaatacaaagctcaagaacaggcgaaacaaatggatggtgatagaagtccatggcagtggctttctgggggtggacgacggggacagggagtgttggctgggaaggggcaggaagcaactttccaggacactgaagatgttccatatcttgatctgggtgttagttacacaagcagacatatggaaatattcaccaagctctatgcttaagactggtgcacttgaaaagcttttttttgttttttgatttttgttttttgttttttttagagacagagtctcgctctgttgcccaggctggagtgcagtggcacaaacatagctcattgcagcctcaaactcctgggctcagatgatccccctgcctcagcctcccaagtagctgagaccacaggcatgcacaaccatgcctggctgattcgaaaaagtttttgtagacacagggtcttgctatgtgggccgggctggtcttgaactcctggcctcaaagagtcctccactttggcctcccaaagtgctgggattataggcatgagccaccacactctgcctgaaaaacttcttaaaaatttaaaatctaagttgtactgttgcaggaaactgaggaccggagagaccgatatggagaagggaaggactgtttattttaggtatgcactagctcagtggatttgcatttaaaaagcttagcattgaataaagacagaatggggtttttataagcagacttcacaaaagtaaaacaaaagcagttaatcatatagtgcataacttgtggcttgtagctgtgtcaaaagaaaaacaaggactggctaaatccagacatttgtaaacacagttatgcttaggaagccagggaaaggagtaacagtaaaggaatttctctttcttttttccttcaaccttgctctaaaaggcgggtgtgtggagcccatttctttagccttggcttcttaaacagcgttatcttataactccttaaagtgagcttgctaggcagaaaaaaaaagaggttttttttgttcctttgttttttgttttttgagatggagtctcgctctgtcgcccaggctggagtgcagtggcgccatctcggctcactgcaagctccgcctcccgggttcaagccattctcctgcctcagcctcccgagtagctgggactacaggtgcctgccatcatgcccggctaatttttttgtatttttagtagagacagggtttcaccgtgttagccaagatggtctccatctcctgacctcgtgatccacccgcctcggcctcccaaaatgctgggattacaggcgtgagccaccgtgcccggcctgttttttttttctttttaacccttgccttgcctgttacttttcttggagtaaatacatacatatttgtttttaaatttctgcctccgtaccattatgactcatttacaatggaggaaatgaaagcgcagggagttaagttactcgcccaagatttcacggcagtcaggtgggaaaccagatggacacaggtcatccaactccacaacctttgctcttaaaatgttatcatatgtaggactcatacaaataccaaacacgaagtgtgtgggctgccctgaggggttcatatggaagaaacaaccagtcacagagcgtgaggaaggaaaaggtccatttgcggcagggtatcagcgtgcagaatgggggcaggacgcaggaggttggccctgatgaacagactggtaccactgaagccgagctctggaggggtcagactgcagagggcctggaacactatcctgaatagtcagatttcacgcacgctgggagccacggatgccaaaatggcaaggtgatttcagaggtgacttcaggaaaacgaagctgactgtggtgcatgagatgatgtggaacggggcaaaccgcccctccgtgctttgtcaaaggtgaccatggtgggaaccaagggcaaagtctggcgatgggagagttgactgaaaatgcggccacagcagggtcctctgggcttggagggctgagcgatggacaggaagggggagctggttccgggggaacagaccctaagtccaggtggagacatgtctggactgagaagactcatggccatccctgtcagaagatccaacgggcagccagacagcagagtctggaccacaggtgtggatctgggaggccggcaaccctgaaccagggaactggccagcggaagcgaggctgccacttcccaggtgccacctgtaccagatcagcctgtccggggcaatttcagcagggatggtggctcagatacaaaatctaccacctcacctacaacaataaggacactgtcttctactgcactttattttattgatttatttatttttggagacgaagtctcaatctgtcacccaggctggagtgcagtggtgggatctcagctcactgcaacctccgcctcccaggttcaagcaattctcctgtctcagcctcccaagtagctgggatcacaggcacccgccaccatgcccggctaatttttgtatttttagtagagatggggtttcaccatgttggccaggctggtctcgaactcctgacctcaagtgatccgcccacctcggcttcccaaagtgctgagatgacaagtgtgagccaccgcgcccggccagtcttctattgcactgggaggcagaggttgcagtgagctgagatcgcaccacagcactccagcctgggtgacagagtgagactgtctcaaagaaacaagatgaggataacgataccatgtcacagggtggttgtgaaaatgacattaaataacatgatgtaggttaaagaactgggcacagtatcagggcagaagggtccttgggaaagctcagctgaagccgagtgggtgtcgtaggcaacgggaaagtagacaccttcagggtccaggtgaccccagctgatccaggagatatttaataccatcgggagcccctcagtcagggcctggctccaaggggaggaatcctggaaaccagcatctttcccacgggacaagccacctccttctcagggccccccattctttgattgatggagcagaggttggggagccaggacagctcagtggtcaagggcagaggctttggaatcacactcgggttccattcctgagattagcacttcgggaatgtgaccttagccatgtgaccttgggcaagctacttagccattcagagcctcagttttctcatctctaaaatgaggataaaaacaagatctatacctcatgaagcttttgcgaggttacaatgaggaaatatatgctatgcaaggcacccaaagctggcgctaacaaaacggcagctattatcattattcccctgctctccttcctgagtaccaagaacccttagggacctcccagcccttaaaaaacaaaccagggctttggcaatttgcagtgagttaagactacagcaagctttgtcagctaactctgctgttcatcagtcagcctccattcagcacaggctggtggactagttacgacttaaattctttttttttttggagacagagtcttgctctgtctcccacgctagagtacaatggcacaatcttggctcactgcaacctccacctccccggttcaagcaattctcctgcctcagtctcctgagtagctgggattacaggtgcccgccaccacgcccggataattttgtatttttagtagaggtagggtttcaccatgttagccaggatggtctcaaactcctgacctcaggtgatccacctgcctcggcctcccaaagtgctgggattacaggtgtgagccactgcgcccggccagttcatgacttgaatcctaagataactgttccaatcttcactgcacactggaatccctggggagttgggaagctctctggctcctaccccagggattgctactgaattggtatggaatggcctgggcatcaggcctgttaaaagctccccaggtgactctaatgtataggaaggccaagagccgccaggttcagacagggacactgaagtgagcgtctttacaaccaaatggaactaagactcttgctgggcacagtggctcacgcctgtcatcccagcactttgggaggccgaggcaggcggatcacctgaagtcgagagttcgagaccagcctggccaacatagagaaaccccgtctctactaaaaatataaaaattagccgggtatggtgacagatgtctgtaatcccagctactcggggggctgaggcaggagaatcgcttgaacccgggaggcggatgttgcagtgagctgagatcacaccattgcactccagcctgggcgataagagcgaaactccatctcaaaaaaaaaaaaaaaatactctgaagcagcctatgaagccatcagccaggcgcgtgatcaattcagccagcacagggaaggctgcccggaagaggcagggcttgtcctcagtcttggggactgtgggattcgctggggaagagaagacaagacggacggaaagggctttgctctgattgtgaaccacagacaggcaggggtgggtgggggtcggcccctgtctcattcactcaggaccctcggcctggcctgtagcagccactgggagcacagacagcgccaccctcaccccgaggcctggagcccctcattagcccagcaaagcggcaactggaggccgggcagaggctgtggggcagctcactcctgggaggaagctcactcctgggggacagctcgctcctgggggacagctcattcctggggacagctcgctcctgggggacagctcattcctggggggcagctcgctcctggggggcagctcgctcctgggggacagctcattcctgggggacagctcgctcctggggggcagctcgctcctgggggacagctcattcctgggggacagctcgctcctggggggcagctcgctcctgggggacagctcattcctgggggacagctcgctcctggggggcagctcgctcctgggggacagctcattcctgggggacagctcgctcctgggggacagctcgctcctggggggcagctcgctcctgggggacagctcattcctgggggacagctcactcctggggggcagctcgctcctgggggacagctcattcctgggggacagctcgctcctggggggcagctcgctcctgggggacagctcattcctgggggacagctcgctcctggggggcagctcattcctggggggcagctcgctcctggggggcagctcgctcctgggggacagctcgctcctgggggacagctcattcctgggggacagctgctgttgcaggagttgtttgctccggctctgcctccactgctgggaacagactcgaggccccaccatgggcgggtgttatggcctctctggttgccatggagatgaaatccaatcatccacctccaagatccttggaagagggaggcagagaccgtagccgcctggagaagtggccgcctggagaagctcagggctccacagcctgagacaaaggaatcatagttcttggacatcaagggcagaggctgaggcccagggtgtcagggtggccagcagccctgggcagagaagcgcatgtggcttcaccagtctccagctcttggggatggatgggacatgctgagtattatctgcgcagtgttttacacggtgagcccacggccaggatctcatttcatccccacagcccagggaggttgtcaaagtagctatgaatggccccctttgacacgggggaaaactgaggcttctgagtctcatccaaggccacctggctgagaaacagctgagccacagattaaagctactctttgcaccaaggccattgtttcctgcgatttgacaaaatccccccaccttggcagagggaactaaaattcctcatctctctgtaggaaagacagttatgtgcccaccgaacatagaggaatcatattgcagacgggccgtataaccttgccatgatacgacgaaagctgacggcatgtgtacgcaagcaacagccactcaacaaacatctcctaagctatcacacaccagatgcaggggcgggcacagactccagcacccccagctccgttacgagtcgcccatggaaaggcaacgggattcaacgaggtgggcatggggccaggaggcagatctgggtcccgcgtccagacctaatctctaggtgccgccacttccttatctgtaaaatgggcaagacacagctgccctgcgcagttcacagggctgcccctgtggagtgacaagagataccagataaaaagagcatttcacaaacaataacgcgttcagtcaatcaggcaaaaaaaaaaaaaggggcaggggccaggctcagtggctcacgcctgcaatcccagcactttgggaggctgaggtgggtggatcacctgaggtcaggagttcgagaccagcctggtcaacatggtgaagccccgtctctactaaaaatacaaaaattagggctgggtgcagtggcttctgcctgtaatcccagcactttgggaggccggggcgggcagatcacctgaggtcaggagtttgagaccaacatggtgaaaccctatctctgctaaaaatacaaaaattagctgggtgtgtggcgggcccctgtaattccagctactcgggaggctgtggcaggagaatcacttgaacccaggaggtggaggttgcagtaggccagatggtgccacggcactccagcctgggtgacagagtgagactctgtctcaaaaaaaataaataaataaaaataaaggaaaaaaagaaagaaaataaatcctctacaaagaaagcaagtctgagttcgtttgggttatcggtatattctgtcttccccgcgaggtggtggccctcttctgctcactgcctgttatttgtggcgcccaggacaggactcacgcagagccaatgctcagtaactgctggctgagtgatacgatctcctaataatcctcctcatctcttcccataacaaccaattcaattatttagggtctgggggccaggaagtccttctgacaaatcccataggagttctaacccttattagagttaacagcttcagcctacttcctgcttcccctccgaacctcctcaagaattgataacaagtaataatcctgggctgatttgatttaaggctctgctcttcctcctgtctttccctgtgggaaatgccactcagccccagagctgcagaaggcgggtggccaggaggcgatgacctgggaggacctttcaatccaacggtgctcaccacctgcctgggatggcctcctcggagcccccctcccatctatggctttgtaagtccttagggtatttatgaaaaattaaatgacaatctagtgctgagaagtaggaagaggcaattcagagaacagacaagtaatgccaggtccagagaggccagcaagactctcaaagcagccctgcagggtggcagcagccaggaccaggatgcacgacccctgccttccaccccagggtgcccttcaatcccagagccacgcagctccgggctcctgcccctgtccgcagaagtcgcccaaggcgtccacttgcaccccttcacacatacacctgcagaagcagccgcacctctgcccagtgctgctgggtggccacgttcactggccttcggctcaaaatgctggctctccacccagagccttcctgggccttaaacataattctactgttgaactgggctgtcacagagtgcctcaaaagtcacctccttctccccactcccagctccagagcaccggtgactgtgacttccacttccaatgtcttgtgtcattcaaggagggcaggtaagaggacgtgcccaggttagcctcttccttggacattcgacgtcaccattcctccagagtggtgcaaagctaggtgtgcgcggagctggggaagggcaaaagcccagccagcttgtctctgcttgtttctatccacgcaggcacatggagacacacacacacacacacacacacacacacacacacatcacatccttgtggccccaccacctctggcccccacactccattcagcccccggcctctctgctgccataagcaccctcctaccagcaagcacagccatcacttggaggctgtggtcctgagctctggcttccccaaaggtgaaacggaatgataggattgttgtggggattccatgagatgacgtctgtaaacagctcagcacagtgcggggcacatgaagatgaccatgattctgccacttcccctagaagtcagttacacccaagtcccttcagtgcccagacacctgccaccatgccaccactgccacatgacaccactgccaccactgccacatgccaccactgccacatgccaccactgccaccaggccaccactgccacacgacaccactgccaccatgccaccactgccactactgccaccattgccacacgacaccactgccaccactgccacatgacaccactgccaccaggccaccactgccaccatgccaccactgccaccaggccaccactgccacacgacaccactgccaccaggccaccactgccaccactgccaccattgctacatgacaccactgccgccactgccaccactgccaccatgacaccactgccctggccacagagcaggctcaagggccttcatccttcacataagccacctgccactatgtggtcaacacgaccagtgcccagcaatatccccatcctcctgtctttctgggcacatggaaggccgtactgtctggccacttggcagtccctgggcagggccaggtgctcagtcctggctaacaaactgtaagtggacatgacaagtatcatttcacggctgaacagtgaaaaattacacacagctctttctccctttctcctccctctgtgacccttggaggccacatattccaaatggtgcagtctccatcaggctgggtcccggcatgaccacggggagcagagccccccgtctaccaggaccactgtgagcaagcagcagcttgcttgtgttaagtgatgaggatttcagcagtaatttgtggggggttttggttgttttttttttttttgacacagagtctcactctgtcgcccagcctggagtgcagtggcacaatcttggctcactgcaacctctgcctcctgagttcaagtgagtctcctgcctcagcctcctgagtagctgggattacagtcacccactaccacactcagctaatttttatatttttagtagagatgggatttcccaatgttggccaggctggtctcaaactcctgacctcaggtgacccacccgcctcagcctcccaaagtgccgggattagtgtgagctaccacgcccggccttcagcattaatttggttctacggcatgaccggctaccctaacaccctgctcccactcagcccttccatgtatgctcagaaggccaaccccagcctcacggaagctccacacacacttcccaacacagcacctgacagtcctttctcctaaccccacccacgccagcctcatggcaagctgcagccgcccttttcccattcaggagagaagcagaaacccagcaccctcttctggggaaagacgggaaagcaaggtggaatgtcttccagcaagtaagtaagtgccaggagcaccaacggcttagtgttgggtagaagctggcacctgagggccacgccttcccagccagcatgatggccccaggctggtcaatgacccacccactctccccaggctggtcaatgggcccaccccacggtaagcttcaaggatggcctgcttgctgctgatgagtgaagtaagcccaaaggttgtcggggaaatacccgcattcctaagagcattattgacacttgccaaaaaacagaaacacctcaagtgtctatgggtggatgaatggatacacaaaacgcggcctttacataaaacggatattattcggcttatattccgacacaggccaattctgacatcgatgaaccttgggggcattaggctacgtgaaagaagctggtcacagaaaggcaaataccacatgattccactcggatgaggtgcttagagcagttagattcatcaagtcagaaagtaggagggtggtggccaggagctgggggctggagaaacggggagctgttgttcaatacaggggtccccagcccccccgggcatggaccggcaccagtccgtggcctgttgggaaccaggatgcacagccggaggtgagtggtgggtgagcaagcgtcaccccctgaaccccacttcccatccgagcagcagcggcattaggttctcgtaggagcgtgagccctgtcgtgatctgcgcgtgcgagggatcgcagttccatcccgaaagcgctccccacccttccccggtccgtggaaaaagtgtcttccacgaagccggtccctggtgcgctggtttcacagatgcggagtctcagtttagccaggtgagagttccggagatgacggtgctgatggccgcaccagagtgtgaacgtgcctcgggccactgatgcgtacactggatggaaaattttaggcatgtgtattttgccatgattttcttttgttttttgtttttgtttttgttttttttgagacagagtctcactctgtcacccaggctggagtgcagtggcgccatctcggctcactgcaagctccgcctcctgggttcacgccattctcctgcctcagcctcccaagtagctgggacgacaggtgcctgccaccatgcctggctaaatttttttgtatttttagtagagacggggtttcaccgtgttagccgggatggtctcgatctcctgacctcgtggtccacccacctcggcctcccaaagtgctgggattacaggcgtgagctacctagcgcccggcctattttgccataatttaaaaaaatagaataaaatctaaatttaaaaaaaaagtagacaggaaaggagtaataccagggacagagacccccccatgggtatcgacaggaggccagggggctgaaccaggcctggagcccacccagcttctgaagaggggttgggagtcaccttctgaattacaaaggaagatcccacctccagaattcatttctggttttagtttttttttttttttttgagacagaatctcactctgtcacccaggctggagtgcggtggtgtgatctcagcaacttccacctcccgggttcaagagattctcctgtctcagcctcccgagtaggtgggattacaggcatgcaccaccacacccagctaatttttgtatttttagtagagatggggtttcaccatgttggccagctggtctcgaactcctgacctcaggtgatctacccaccttagcctctcaaagtgctggggttacaggcgtgaggcactgtgcccggcccagagctcatttctgttttgccgccaactccctggcacaagacgagctcagctcggccataggtaggggttgccgggcacctgtcagctccaaatgccaggagccaggctctccgaattccactcccagttttagctgtgtgtcctggggcaagttgcttcatctctctgtgctttagtgtcctcatttgtcaaatgaagataataacataacaacatcatcccatgcagcttttgtgacagttgaatgagttagtccaggcgaagttctaagaacagggcctggcacgtggtataacgttagtggctgttattgtcgtcactgacgttgtcactgctgttgtccctgttgttatgatttctccccatagtcccggcctgggagagacaccgagaggaaggccagcttgcccggtgtcttctcaagggctgacacacttctcaaagcgctgagattacagacgtgagccaccgcgcccggcctgtgtcagaattttttttgttacccacctgacaaagctcttcatcttgctaaagataacagagcacttggccaagccagcgcgatgtctgcactcagatctcctctctcatcttttgcccacaatgggaaaggaggtaagaagtctgtgttccgggtgtgctgagcacttgctgtgtgctgggagttgcggtagacactgtcctgtatgattccactctgaagaggtgctcagagcagtcagattcgtccagacacaaagaggagggtggtggccaggagctgcaagcagcggcacacgtgtgggcaatacacaggttgcccaagcgccgagagaggcccaggaggacgggccccgggcatggcaagcgcactgccccctctcactcctccggcggccgccgtccactcccagtcctagatctgagctccttcctgggagtccagggcccttcacaagtttgggtgaacactcctggtacacggtctgtggtaacatcctgcacggctctaaaccagaggcaacagggcaccccacccactgggaaccacgcgagcagggagggacgaagggaggagcatcacgcacacagacgccggactccctaggttctgcaaacccagccatcaacacacagaggcccacgagcccattcctgagcctccctcccttgctgagctactggtgcgcgtatgtgtgcatatatatacacatgtgcacacacacactcctgggggtgaggaggtcacgtatgcaacttgctgtcatctttctaaaaggtaagaatggaggcaggagaacatttgattcagagctcatgctctgcagccagactgactgggtctgaatcacaggctccaccccttaccagctgtgtgaccttgggcaagtcacataacctctctgtgcctctgttttaccttcaacatggagtaacagtagcacccaagttcacagggtttctgtgaggatgaaacgagtaaacatctaaagcacaccgaagagaggattagttcctattaccacacctcagaagctcagcaagtcagatctcatgactgccaggctctcacagaggccctggttcccctctggctctacgtcttatttccctggaccagttccctaaagccctgtctgctgagaactcatctgacaattcatcctaatccctagagggccccaagcaaaaatcccaagctcagttcctgcacccaggctaggcttggtcagtgtccagccctgccctccccaactgcttcctgggcgtgacaccctcaacgcccccacctctctcattctgccatttagaaaccacaaagggcctcggtcagccactccccacctcaaagccgcgttcttccctgcggagagattgtcatggtttttccagcaggggatggagaagtgtgtttcttcacaggacatcctgagaatgcctgattctggggatggctgacatcctacagagccctggacaggaagcccaaggatttaggttgaaccctttttgggcaggtcacttcaactctctggctgcccgatccggctcttctgcaaaacaggaacatcactgcctcctccccaagtgagggagaggatacaatagaaagacaggacatccatcccggctaacacgaggaaactccgtctctactaaaaatacaaaaaagttagccgggcgtggtgatgagcgcctgtagtcccagcactttgagaggccgaagcaggtggatcacgaggtcaggagatcgagaccatcctggctaacacggggaaaccccgcctctactaaaaatacaaaaaagttagccaggcgtggtggtgagcacctgtagtcccagcactttgggaggccaaagcaggtggatcacgaggtcaggaaatcgagaccatcctggttaacacggggaaaccccgtctctactaaaaatacaaaaaagttagctaggtgtggtggcaggtgcctgtagtcccatctactcgggaggctgaggcaggagaatggcgtgaacctagagcttgcagtgagccgagatcgcgccactgcgctccagcctgggctacagagcgagactctgtctcaaaaaaaaaaaaaaaaagacaggacaggctgggctggtggctgatgcctgtaatcccagcactttgggaggctgaggtgggtggatcacctgaggtcaggagtttgagaccagcctggtcaacatggggaaaccccatctctactaaaaatacaaaaaattagccgggcgtggtggtgcgtgcctgtaatctcagctactcgggaggctgaagcagaagaatcacttgagtccaggaggtggaagttacagtgagccgagatcgcgccactgcactccagcctggagaacaagagtgaaactctgtctcaaaaaaaaaaaaagacaggacagtgtctactacaactcccggcacacaacaagtgctcagcacacctggaacacagactttttacctcctttcccgttgtaggcaaaagatgagagaggagatctgaacccaggcattgcactggcttggccaagcgctctgttatctttagcaagatgatgagctttgtcacgtggttaacaaaaaaaattctgacacaggccgggcgcggtgggtcatgcctgtaatcccagcactttgggaggccaaggtgggtggatcacatgaggtcaggagtttgagaccagcctggccaacacagtgaaacctgtctctactgacaatacaaaattagccaggcatggtggtgcacgcctgtagtcccagctacttgggctgaggcaggagaatcgcctgaaccaatgagccgagattgcaccattgcactccagcctgagcaacaagagtgaaactccgttaaaaaaaaaatttttgacacagcctgggcaggtttaatcagctgtgatccagagccgccctctgttctgggagatggggaccagtctggacccctttcttgccccatcatcaggtgcacttggtcaaatccccaccataccccttcccccacaactaggcagaaggaccaaggaaggccccctgacactacatgggcctggcgtggccccctgtgtccctcagtcataccccccagcctggccaatgcccagatggcttttgggacagtgcccatcatgccccccagcagatggcacacctgcgggagggctggggatccaggcacacctgcgggagggctgggggtccaggcacacctgcgggagggctgggggtccaggcacacctgcgggagggctgggggtccaggcacacctacgggagggctgggggtccaggcacacctgcggggagggctggggacccaggcacacctgcgggagggctgggggtccaggcacacctgcgggagggctggggacccaggcacacctgcgggagggctgggggtccaggcacacctacgggagggctggggacccaggcacacctgcgggagggctgggggtccaggcacacctgcgggagggctgggggtccaggcacacctacgggagggctgggggtccaggcacacctgcgggagggctgggggtccaggcacacctgcgggagggctgggggtccaggcacacctacgggagggctgggtccaggtctaccgaacctgtcagcctgtcacacgcatcacatggtgagaaaacctcgcccggcaaccatctcatccttctcactggtttgaagcctggtggtcaccatagcaacaggctcccgctccagcctgccaggcggggctgatgcaattctcggcagcgagcagctccaactcagctcacatggctctgctcccactcgggggcgggcgcgtgggaggaccaacgaagagggaggaggtgggcacgcagcccacagaaatctcagcttcccccagttctgctccgaggactgggtctaagggacgagggccaggaactgagcagcgggttcacctcccaggtccttcatgatcctggtgtccctgccgcggctgccacttctgggagattcatctctaaggcctcaggggacctgggggatcgggagacaggctgtaccatggcgtctccaccaccacacggtcccctccccgcctgcaccccacaagctgggcacccccacttcccggggcccacgggcagcccggaccttcagaattcaacaggtgcagcttacagttcccgtcccgtggtgctgcctgccctggttgcattaaagtgctcataaagcccagaatcctcctgcaaaccaaaatatctccatggtgccggccagccccttcctcccagctttccatcccactccacaagggtgtctggctgccctggggagtgttacctcctctgcacggaaggcacactagctgagagcccgttcaagcatccacatcccccaatttcatggaacgagcacacagaaaggatgggggtcacctcgtcctgcctgcccgcccaccccccacacactgcggacacagggaaggaagccacaggacaagagcttggcaatgccgtgtcctcagggctccggcgcctacccatggatgtagtgctcgccctcccaaggccggtgtcctggtgacgatgccactagtgccaagaatgcttccctcctgcaggccccgctcccttccccattccagcagccacttcccaccctgcatttgttccctcctacctggccctcaccaaggcatccacccaatcctggcggggcctcagcacaaacagggcctgctctgggaccgtgcctcctgccaggacgctgtgccaggaggagggatctgcagatcccttcccgggcgccctgggggccagccagtcacactgggccctctctgtggtcgcctcgatgcctgtgggaagtgattagctctgaggccacttgagagatggtgttcagctctgggatgtcccagcaatgtgtactatgggagcctccaggatgactggagcagatgggcaaagaaggtaaactgtcaggctgggggcatctttccagacacacagatccacggagtcacgttgagtgagtccagaaaggaacccacatatctatggtcgacggattgtcaacaagggcaccaagacccttcatggggaaagaagaatcttttcaccaaatggtgctgggacaaccagattgccacatgtaaaagttgaacttttactttctaccatattcaaaaaataactctaaatggatcaaagacctaaatgtaacagctaaagctaaacaacatgtagaagaaaacctgggggtagatcttcatggtcttggacttggcaaaggattcttacatacgacaccagaagcacaagcaacagagagcacgggggaaccgcacgtcatcaatgaacacttctttgcttcaaaggaccccatcaagaaagtgaaaagacaatgtgcagaggggaagaaaacatatctagactatattttaaaaatcttacaactcaacgataaaaagacatctaggccggccgcagtggctcacacctgcaatcccagcactttgggaggccgaggcgggcagatcacaaggtcaggagtttgagaccagcctaaccaacatagtaaaaccctgtctctactaaaactacaaaaattagccaggcatggtggcaggtgcctgtaatcccagctactcgggaggctgaggcaggaaaatccaggaggcggaggttgcagtgagccgagattgcgccattgcactccagcctgggcaaaagagcgaaattccgtctcaaaaaaaaaaaaaaaaaaaaggatagggtggcaggtaggtgggtgaccagatcctgctggccatcgagggacaggagaggtgctcaccgtggagcacagtgtcctggtacccaggtggccccaggttcaactccaacactgtgatcctcaatgggggtgctgtggggacccaaattcagacacccatgcccaccagcctacaccagagggcagacgggtatctaaggggcacatgctgtggggaagagcctaggcctccggctgcagggggctcatgaggagccattctgaggactgagcctttgttgagagggaacctggggccaggtggctgctcccttcacatgggcgacagtgtccagtgagaaaataaacctcttttcatgtgaagaaaaaaaaaaggcctctcctgagttcctggctgggtagccgggtagacggcagagctaaatgctgtggtggctcacgcctgcaatgccagcacttcgggaggccgaggtggaaggatcacctgacgccaggagttcaagaccagcctggccaacgtggtgaaaactcgtctctactaaaaatacaaaaattagccagacgtggtggcgcacacctacaatcccagctacttgggaggttgaggcaggagaatcacctgaacccgggaggcggaggttgcagtgagtggagatcgtgccactgcactccagcctgggtgacagagagagactctgtctcaaaaagaaaaaaaaaaagctttatgtgcattatcttatgtaatcctcttaacaattacttggtgaatagtgagttccactactatccccatttcatagaggagtaaactgaggcacagggagatggactaacttgctcatagtcacgtagttacttaatggtgaggctgggatctgaatacaggcagcctgagaagtggctcttccgtccacctccaacctccttttagccgagggttttgagctcatttcaacacagccactgtgtccagggataccagcaaagaattagatcaatgtcaggctctgacgcacaggcaggctcagtaataacaacagtccacacacacatacgataagttaactcaccgcagcctcacaccgcgccaggaggcaggcactaatattatctcaattttacggatgaggaaaccgaagctcagataggtcagatgactggcccaaggtcacacagctgctgagtggcaaagcttggaacccgggcagtctggtctcagacactaccctctcttgctactaagtcagtcgtgctacagcgcacattactttttttttttttttttttgagatgaagtctcactctgtcgcccaggctggagtgcaaaggtgcaaccttagctcactgcaacctccacctcccgggttcaagtaattctcctgcctcagcctcccaaatagctgggattacaggtgtgcgccaccacgcccggctaatttttatatttttaatagagacagggtctcaccatgttggccaggctggtctcgaactcctgacctcatgtgatctgcctgcctcggcctcccaaagtgctgggattacaggcgtgagccaccgcgcccgacctcagtgcacacagttctaacatgcctagggggctggtccctcaggccacaggccatgagaagcagcaactacaagggaagagccgctgctggaacacgcccagcggaacagggggaagccaacaatcccggcagatgaaggaaaggaaccggcaggcacaccgctctcacgccaatgcgtgcggacagcctggtgggatcagcaggaccatgacctgagcctgcctgccaggcacagaacctcaggcgcacccaggcagacccacgatggggtgcactcagccccgtatcattcatgctgcaggtcagcctaggaagggatcgtgcagtttggtaggtcaccttctagaatggattgaaaaggattatctcgcctaataagggcaggtattactttatgaggctcatttcaagcgtgcatgggtatatgtgtgtgtgcagatgtacgtatgtgtgtcgcgttgcagcatgaaatgattttccactatggattctcttccaacaggtggaaggagcgtgaccacccctgagtaagccgccatttattcctgcaatggaattccaggcagctttgacggtgcacagtttagagctacaggcaggagcgaagatgaacctaaaaacataaatttaaccagaaaagggcagctcacaggaacatgcttacaatgtaattcttcttctttttattctttttttaaatttgtatttatttattttttttaaagtagagatggagtttcgccatgttgcccaggctggtctcaaactcctggactcaggcaatccagccgcctcggcctcccagactgctgggattacaggcgtgaaccaccgcgcccagccgtctcgttagtctttagtaaaccaaacccagacattgtatgtgctgttttgcatattgctacatttcacatataacacagaaaatggctgggtgcggtggctcacacctgtaatcccagcactttgggaggccgagacaggcagatcgcctgaggtcaggagttcaagaccagcttggccaacatgatgaaaccttgtctgtactaaaaatacaaaaattagccaggcgtgatggtgggcacctgtagtcccagctactcgggaggctgaggtaggagaattgcttgaacctgggagttggaagttgcaatgagccaagaccgtgccactgcactccagcctgggtgacagagcaagactctgtcttaaaaaaaaaaaaggaatcaaaagtgcgtagggctagtccaacccttacatttcacagctgaggacacagagggctggcatgggagtggcggaggtagaataaaaacccagatctcctgcctcccagtgcagccaaagccaccgttgtaaccacagcctaggattacccagagaaggctgaagcctgttcagactacagggagcctgtttgggactcacagtcctctggcgatgagcagagactcttcatgctttcgtgccttggacccacagcagcctggtgaagccaagggacctttctctgaagaatgttttgaaatgcgtaaaactaaactatgcaggatgacaaaggaaaccaactatattaaactactgtcttagtcatggaactctcaggagtccaagagaagtaggaatgcagtactcatacacaagagaagaatgcggtactcacatacaggagaagtaagaatgcggtactcacacacgggagaagtaggaatgcggtactcacacacgggagaggtaagaatgcggtactcacacacaagggaagtaagaatgcagtactcacgcacaagggaagtatgcggtactcacacacaggagaagtaagaatgcggtactcacacacgggagaagtaggaatgcggtactcacacacgggagaggtaagaatgcggtactcacacacaagggaagtaagaatgcagtactcacgcacaagggaagtatgcggtactcacacacaggagaagtaggaatgcggtactcacacacgggagaagtaggaatgcggtactcacacacgggagaagtaagaatgcggtactcacacacatgagaagtaagaatgcggtactcacgcacaagggaagtatgcggtactcacacacaggagaagtaagaatgcggtactcacacacaggagaagcaggaatgcggtactcacgcacaagggaagtatgcggtactcacacacaggagaagtaggaacgcagtactcacacacaggaagcactcagtaaaagccagtgacacttacgaccattaatcttcagaatcccttccacgtccttggtcgtgggtccacgatgctgaggagggaggcccagggacctgtgcctttgagtcagacctgtgggagcccctccagggcctgatctcggcgagggatgagggatgctggccctgaactgcaggcctcacacgtgacgctgccgccgcttggggaggtgccttctggagggaacaggtcccttggggctgagaggagagggacccacagcaggccctgcctggagacagggaggtagggcgcaggaggaaacacttacaccaataggagcagagccctggggtctagggccgctgtacctctcctctctggtacaaggttcaagaattgcttgaacccaggaggtggaggctgcagtgagctgagattacaccactgcactccagcctaggcgacagagcaagactctgtctcaaaaacaaaaaacaataacaaaaaaaaaccacacacacacacacacacacacacaaaaggactaacacagcctcttatgggccaggcactcacacattatttaagcaaagttcatgaaatgtcagctctgcaactgtacagtcagtaggaattacaccccaaattcagatgaggaaacaggctcaaagatgtaacagcttcatgcaaccagcattgacacctacgtctctctgactctaaggagaactgaatcccagtgaatgtccgttcattcatttttcattcattcattcactcaccaaacacttctcatggttcaggcactgttccaggtgccaggggtacgacggagcagcaaacagaccaaatgtctgccctgtggagctgagttcacacgacagccagacgccgagcgcgtacgaggctctggggagggaggcggcgcagatgactcagccagggccacccccgaggagctcacattcaggttaatggaggtgttgccattctctgttgaagaagtgggggaggacagacgtggcgcatctgagaacctattctaccgtgaattattaacacttttcacagaggccacgctccacaaagggaacttcagcgatacggaaatctcccaaggtgggacgcccgtgcggtggaggcaacgtcactccatcgagccttgctctctggccccgccacctgtacgagtgctgcagacggtgccttctgagggaagcgggcaggtgtcgctggaccgccctgcctgctaaatatctatgtggattcccgttccaaggacaccatcccttctcagggatacaaggctggggtgtctgagtctcatctccttcccagcacctatcctgggaaggttttgtcggaaatccccgtcacccacaagtccagtcttttttttttttctgagtctcatctccttcccagcacctatcctgggaaggttttgttggaaatccccgtcacccacaagtccagtcttttttttttttaagacaaggtctcattcctttgcccaggccagagtgcagaatgtgatcacagctcactgtaagctcaaactcctgggctcacatgatcctcccacctcagcctcccaagtagcttagactctaggggcattccaccacacctggctaattttttaaaattttttttgtagagacagggtcttgatatgttgcccggactggtcttgaactcttagtctcgagcaatcctcccatctctgcctcccaaagtgctaggataacaggtgtgagccaccgtgcccggtcaaagtcactatttttttttttttttttgagatgaggtctcactctgtagcccaggctggagtgcactggcatgatcttggctcattgcaatctccgcctccagggttcaaacaattctcctgcctcaacttctctagtagctaggattacaggcgtgtaccaccacacccagctaatttttgtatttttagtagagacagggtttcaccatgttggccaggctggtctcaaactcctgacctcaggtgatccacccgcctcgacctcccacagtgctgggatgacaggtgtgagccacagcgcccggccagaagtcactccttttacagccgggccgaaggcacctgttaggtcctctcccacccgctacaccactagctaatggtaatcatagcacccattcccctgggagccccaaaccagcccgggagatgcatttcactgcggaggctcattaagtgactctcccagtgctgcacggactttacatggggacgctgggttcgaatccaggctctgcaatgttgcaatttctctttcctttgccgacacatcctccagaggttagagactcccagcagaactgaggatgtgaaaagactcagttcgtggtgaggacccagtgagtgtttatcaacagcaacaattatcccttactctggcagagaacagcgccgtgaacacacgtcgccagcatccagcttctcagctgatttttacaacagccccaggacatacgtgggacaggcgtttatcaccctcactttgcagacaggagagactcggcaagaacagctgcacctagacacagcctggtttcctggcgtgggcccctccggatcccctctccctgcttctccatcctctcttccaccccagcaggagatgagaggaagacaagggcatgaggctgggatgtggtacccccagctccccactgtgggccacccgggctgtgcacgctcctgcccagaagccctcaccacatggcctctgcctccaggtctaggacacagaccctgccctcaccctgcccacatttccgtcatagctctccccgcactcctcagcctgagtgtggcatctgcttcctgacgggccctaatggatgtggctcacacctctcatcccagcactttgaaaggctaggccaagcacagtggctcacacctgtcatcccagcactttgaaaggctaggccaagcaccccggctcacacctgtcatcccagcactttgaaaggctaggccaagcacagtggctcacacctgtcatcccagcactttgggaggctgaggcaggtggatcacgaggtcaggagtttgaggccagcctggccaacatggtgaaaccccgtctctaataaaaatacaaaaattagctgggcttggtgctgggtgcctgtagtcccagctactcaggaggctgaggcaaaagaatcccttgaacccagaaggtggaggttgcagtgagccgagatcctgccattgcactccagcctgggcgacagagcgagactcaatctcaaaaaaaagaacatgaacattaatcttttgctccattaatttgtgcctctctgttctctcctgtaaactggagatgataagtatcttcttcatagactttgtgaagaataagggagttaatacagacaaagtgcctgcaacagtgtaggacacacagcaagcgctaggctaacgttagctattatcactggccactctgcatcaatcgcatcgtgattttttgtgtcgactctgtatcgaccctgtaaaagcaaaatctcaatgtttctgtgacaattccatagaaacttttcttcagcttggcctctaggagccagggggtggcacaaaagagagaagcaagtcacaagatgagcaagacgcatccaggtgggaccctggcgaagtgtcacacacagcactgaatccagacgcaggggccccagataaactgcaagacgcccagtgaacatggatgtcggagcatccaggtgggaccctggcaaagtgtcacacacagcactgaatccagacgcagggaccccagataaactgcaagacgcccagtgaacatggatgtcggagcatccaggtgggaccctggcaaagtgtcacacacagcactgaatccagacgcagggaccccagataaactgcaagacgcccagtgaacatggatgtcggagcatctaggtgggaccctggcaaagtgtcacacacagcactgaatccagacgcaggggccccagataaactgcaagacgcccagtgaacatggatgtcggagcatctaggtgggaccctggcaaagtgtcacacacagcactgaatccagacgcagggaccccagataaactgcaagacgcccagtgaacatggatgtcggagcatctaggtgggaccctggcgaagtgtcacacacagcactgaatccagacgcaggggccccagataaactgcaagacgcccagtgaacatggatgtcggagcatctaggtgggaccctggcaaagtgtcacacacagcactgaatccagacgcagggaccccagataaactgcaagacgcccagtgaacatggatgtcggagcatccaggtgggaccctggcaaagtgtcacacacagcactgaatccagacgcaggggccccagataaactgcaagacgcccagtgaacatggatgtcggaggatctaggtaggacggaccctggcaaagtgtcacacacagcactgaatccagacgcagggaccccagataaactgcaagacgcccagtgaacatggatgtcggagcatctaggtgggaccctggcaaagtgtcacacacagcactgaatccagacgcagggaccccagataaactgcaagacgcccagtgaacatggatgtcggagcatctaggtgggaccctggcaaagtgtcacacacagcactgaatccagactcagggaccccagataaactgcaagactcccagtgaacatgaacgtcaggtgagcaacagacaagctttcggtctacagataaaatgcaagacgcccagtgaacatgaacgtcgggtgagcaacagactagctttcagtctactatgtcctaagttttgtatgggatatacttacttttctttttttgagacagggtctcactctgttgcccaggctggagtgcagaggcatgatctcagctcactgaagcctcgacttccccagctcaagccatcctcccacctcagcctccgtaggagctgggactacaggtgtctgccaccactcccagctaattttttgtatttttattacagacaagttctctctatgttgcccaggctggtctcgagctcctggcctcaagtgatcctcctggcctcccaatatgcccagccatatgggatatacttatatttaaaaattattcattgttcatctaaaattctaatttaacggggcatccttatttttatttgctgaaaaactcagcagtgctttcagtgtggttggtaagattgttcccattctaaaggtgagaaaaacacagctcactagagcataaataacttgctggaggtcataggctaagcaggtgttcaaagaccaagctcccggcctgcagaggtgcctccacccagccgagcaacaggcctggggccacagaaccgggccctggagcgccttcccacaatccaaaaatgcccctcagtccctggaggggagcctgtgacccggaggagccattttctcccgggcagagggagctcctcacaagccagtgctgggggaagacctcctgcgggtggatggccgggaggaggtgcaagagagggctgcagtcagccagggtggcacccacagcccttccgggagccacccctgcctggcgctgggacctggagacaaaatgtccaggaggaaactcaggaagctccagaggaaacccctcaggaagtcctgaaatagttccacagcccagagtgaaaactttctttttttcttttttctgagacgaagttgtgctcttgttgcccaggctggagtgcaatggtgtgatctcagctcactgcaacctccgcctcccgggttcaagtgattctcctgcctcagcctcccgagtagctgggattacaggcatccaccaccacgcccagctaatttttgtatattttagtagagacggggtttcaccatgttaggcaagctggtctcgaactcatgacctcaggtgatcctcctgcctcagcctcccaaagtactgggattacaggcgtgggccaccatgtccagccccaaaacgaaaattttcaagtgagagcagccttgagggtgccatggtctctctgagtccagggcgtagacccccagtgcctggcagcttggcccggctcacagggccccctccccagagcccacgcagatgacctcagctcccaccccccggagtgtccgcacccaccctccccagcgcggtccccacctccgctctcccagagcccacgcagatggcctcagcccccgcccccggagtgtccgcacccaccctccccagcgtggtcccacctctgctctcccagagcccaaggtggagtttcacttcggtcattctcagctctatttttactcaaaggtggtaggaacaccacacgttcaaagcaggacaggcaagtcgtctgactccacgcggctgcaaggctgagcttttctgtgagcagggacgggggcaggctgcggccccatgcagggcttctctccagggccaagagtctaggtccagtgcccagtccccggtcctgatactcaagcaggtgacattcagcgtcctcttcacctggctgagaaagaccaacagcatccccaagcagaggaacagcacgtgcaaaaggcaccacactatgaatgggcgagtgttgtatcctgggaaaccgggagaggctcagtgtggccggaggcccgggggtgtggcagtggggccaggaggggaggctgcggctggagatgggttggacccagtctctgagaaggctcccacgttgtgctaaggagtttagagtttatcctgcaggaaggagggagctacgaaggcttggagggcagatgctgcaggcgcctggtccttcccatccagtgtgggcagcgcgggcctcacctgggacttgctagaaatgcagaatccaggccgggcgcaggggctcacgcctgtaatcccagcactttgggaggccgaggcgggcggatcacctgaggtcaggagtttgagaccagcctggccaacatggtgtaaccctgtctctactaaaaatacagaaacattagctgggcatggtggcacgcgcctgtagtcccagctacttgggaggctgaggcaggagaatcgcttgaactgggaggcagaggctgcagtgagagctgagatcgcgccactgcactccagcctgggtgacagagccagactctgtctcaaaaacaacaaacaagcaaacaaaggaaatgcagaatctgagctccggacctgccaaatcaaaatgtgcatgtccatcatggcacgggggctgggggaccccgtgataccccagtgatttatcttctcggggtgaggcaaagccttgagctctggctgggcggagagagaggccaccagttggatgtctccagtatccccttctgatggcccttctgccctcctaacacccagctccacctcctgcttggatcctccctgctccaggactctccggggcatccccagtgctggatccagacacccagagccctagagcacttcgtctcttcatagccacccccaactccaaccaatcacaaagcagcatcttcatagccacccctgactccaaccaatcacaaagcagcatttcccagggttccacctgctcggtgcctagctgggtgttgcggggaagggagaaccaccatggtgaaaggctggtcccccgagcggagggagtaagccgaggagcttttcagacatgcagaggcctgggccccaacctgaggtctcatgccccaggccctggcattgggcgcttctggcaaagaacacaggctgaggcgtcaagacagatgtgttgtgtgacctctgggaagtcttggggaagcatgaaacaggataaaaatggctaagaactcagcaggttgccggaggctaaatgagatactgttagcaaagcagagaggacaatgtctggcatcctatcacggaagcctttgttattctccctcgtgcctctaaggagttgagagtctggcagagaagaaatgacaactggcatgaaacactgtgcaggtaaacactataaaacaacacgatatcggccgggcgggtcgctcacgcctgtaatcccagcactttgggaggccgaggcggacagatcacttgaggtcaggagttcaaagcagcctggccaacatggtgaaaccccgtctctactaaaaatacaaaaattagccgggcgtggtggcgcacgcctgtaatcccagcactttgggaggccgaggtgggcagataacctgaggtcgggagttcgagaccagcctgaccaatatagagaaatcccgtctctactaaaaatacaaaattagccgggcatggtggcgcacacctgtaatcccagctactcgggaggctgaggcaggagaatcactggaacccgggaggtggaagttgcagtgagcactgcagaggttgtggagattgcaccattgcactccagcctgggcgacaagagcgagactctgtctcaaaaaaaaagataagaaagtgctaagcgatgtgagccggagcaatcagcattagggactctgagccagggatctcactaaggccagtgctcgaatcaggcctggaggacttcctggagatggtggtagctgagctgaggcttgaagctggttagatccttggagcacagagctttgcaggatggtgagaggccttactggctagagaatgggcagtgtgctgggaaactggaatggataacaagaggttcccccagtctggactgaatgtggtgggaaaggcaatgccccactgaacccactgaaggtttctgggcaaaggagagaaaatggtctagcacagccacaggcagttggaaagggaacagtgtccttcactcagggaggggcttgaggacagacacggcaggcacccacaacaagggcctggctgtgctggcagctgaccagctgcagcaaggtcctccggctagaagcagcagctctcctgacagccaatgtgcgttccatcctttcttcccagggagcaggagaccgaatcagctcctgcctttggtttctgaagattctacacccaaagatggcacttggtgccccagctcatccaggcctcccaagggggaacgtgggtcaggagctgccacggggtctgcaagacgcttgctggcctcgaccaagtcaaggtggctgttccacgcggctgggtggacgccagctggtctctcatgaccctccccgtgacgcactcgcaaagtaactaccaaggctttctgctccattaacaccaaagctggccctgcaggggaaagaggagggagggaggacgtgggttttgtctagacagaggcactcacaaagccagatgatgcctgagcttccgccacgcaggaagagggtgagcagaggagggcagagaagacctggtgcgtccccctcagggtgccccccatggcagaagtcaccagcagaggccaagaacaatggccaatcccccttcttatccttaaaatcagggtaacaacctttcataggtttactgtgaagatgaaatgagatcacgaatgtgagaacgctcgctctactcttgcacccgtgaggtgtccaatcaattgctttgttacttttattcctattgggaaatgggctcaaaagatctgtgtcaggggttacctttcatctggccagaatccagagctacagaagggtctggcttgatttgaagtcccagccaaagggggctccgctaaggtgtaagccccccagacacaggccttccccaggggctgacctctccgtgggggactctctgggctcgagggccgtcgtgggtgtgagcctgggtctggagggtctgccccgtcattaacatgctgcgcgcgggagagttcaaacacagcagctggctctgcagcccagcaggccctgggcctcggcaaaggacctcgatgctcagtggcctgatttatggctgagggctctctttattttccttttgaaatgtggaggtggattttaaaaggctggagagcagggccagcacgcttgggctctgccaaatccccgcgtcctcgcccctggcctcgctctagaaactgggcactggccctgctccatcccaaccgccaaagtctattctcactctccctttctctgtgtttgtgtttgtatgggggggtgtgtttgtgtttgtgtttgtgtgtgtgtgtgtggggggggggtgtgtttgtgtatgttaacaatcagcacttcttgccaataattccaggaacacagcaatgcaggcacgtgggctccaagtgcccatgaggagacctccttaggctcatgcccctaggaagaggcagcccagttggtggatgctcccagtgcttccaggatgcctggggcagagggctgtctcctcatatcacgggggcttgggggcaagacgcagtcttcacaactgtctttctagctagagaaatgaacccagatccatcaacctcagtgaaataccagcgtcaaggagcccccaccagcaccgctgtgaagggtaagagtgcgggagaaagaacacagtttacagcagggccaaccgagcgcacagtccctggcttgtagtctgcgaccttgaattaattaatttagtttgtttatgtatttatttatttattttgagatggagtctcattctgtcgcccaggctggagtgcaacagcgtgatctcaggtcactacaacctccgcctcccggattcaagcaattctcctacctcagcctcccgagtagctgggattctaggtgcctgccaccatgcctggctaatttttgtattttagtagaaacggggtttcatcatgttggtcaggctggtctccaactcctgacctcaggtgatccacccacctcggcctcccaaagtgctgggattacaggcgtgagccaccgtgcctggcctgtctcttccattctttctaaaccaaattaaaaactagtttctatgaatccatcaggactgatggactttcttttcacgggaccccaggatcctgggagacccaaggatgaggtttctatctatgtccctctacagaacccagacacagttcccaaagaggctcccgtgggcgccattgcacagaacaactgcagggggcactcttgcatagcacacactgccacgctgaccccacaactcccagaggggtctctctcctaaaacttcaccttcaatagcacacactgccacgccgactctacaactcccagagggatctttctcctaaaactttgcctccaagggagagactccctcaaaaagatgacgtatgggctgtttaggcccgaggtaacgcgaacggggtaaccacaagtgacgaagtcaattgcggctgtgaggagtagatgttcccagccagagaaataactggcttaattacacggcgtctttggtccccgtaatctcgatccattaaacctttgctgctgaccaggagccgctgcccaggaggaaggggttagcccagaacactcacagaagcagcccttcaatcccacgaaggtaatgatggccacatccttccccaacagccccgagtaagcccacagatccctgctcaataccaggcttctctaggcagcaccagctccaccgatgccccggggagtccagcagccaagctgcccggagtgacaaggactctgagcttccttggctctggtttacctgaggcctcccagccacccaagacttcctggagaccctgctagccttaggcaagatgcccaatcacgtgtgccatgtccacctgtgacctagaggcacaccaaggcatcagaggtgagggcagggacaagaaggaggtgagtgaggccaggcacggtggctcacgcctgtaatcccagcactttgggaggccgaggtgggcggatcacctgaggtcaggagttcgagaccagcctgatcaacatggagaaatcccttctctactaaaaatacaaaattagccgggcgtggtggcagcacctgtaatcccagctactcgggaggctgaggcaggagaactgcttgaacccgggaggcggaggttgcagtgagccgagatcgcaccactgcactccagcctgggcaacgagagtgaaaatctgtctcaaaaaaatgaagaaagaggggagtggcacccgattaatcaatcaggtcaccacagagccgaccacatctggctctatctactgaagcccaggctgactctgacattttccatacagccagtaaacccagattcatctttcggtctagtgtgtgtggggaggaaggaagggcaggaggaggacacaggataaagcctggacaaaaaactgggcgagaggccccagtcaggtctcgacccggggacagagaacccgctgctccatccacaagtggccacggcctcagatggtcccgcctcaaagggctctttgccaaatgcccaggcaggggtgggattgggcattatcttcagcctccatacgggggtgccttccgtagcctgcctattggcctgatttctttctccttcccccttcacaaggtctctgggtcaggttctcctcaagcttcagggaccagtggaacattcccgctgctcccagcagcgtcatgtccccaactgaccatatcttgccctaagaaatgcaagctactcctgggccgggcacggtggctcacacctgtcatcccagcactttgggaggccgagatgggtggatcacgaggtcacgagatcgagaccatcctggccaacatggtgaaaccccgtctctactaaaaatacaaaaattagctgggtgtggtggcacatgcctgtaatcccagctactcaggaggctgaggcaggagaatcgcttgaacccaggaggtggaggttgcagtggagccgagattgccccactgcactccagcctgggtgacagagcaagactccatctcaaaaaaaaaagaaaagaaaagcaagctactccccacagcagcaatggactttctcacatgtggggacaagccaaggtcacatgtcacaaacagcctcccctatcacagccccagagatgggtgagctgcagaactctccccctggtacaaacagtcacttggagaaaagtgccaagaatatagaacagagcaggtaatccaccccccccatcacctcagcccacccaacacatcacctcagtccacccaacacatcacctcagtccacccaacacatcacctcagcccacccaacacatcacctcagtccacccaacacatcacctcagtccaccccccccatcatctcagcccacccaacacatcacctcagtccaccccccacacatcacctcagtccaccccccacacatcacctcagtccacccaacacatcacctcagtcaacgcaacacatcacctcagtccactcaacacatcacctcagcccacccaacacatcacctcagcccacccaacacatcacctcagcccacccaacacatcacctcagtccaccccccccatcacctcagcccacccaacacatcacctcagtccactcaacacatcacctcagcccaccccccacacatcaccaacacccgccaccaccaagggcctggcaggggcagtgggcgcagggttgtcttgaagccgcctgccctaggtttgcgcccaaagggctcaagctcagccaaacagctgccgccaacgctggcagtgaagtcctccaatcataaaccctggcaaaagcgcgagactccctttgggggtctctgactccactacgagcgagtacaatgaccaaatccacacagccggaaacgcatggacgggccagctgacaggtttcagctaacaggggtttctgctgcggggaggagctcaaggagccaagaactcgagttttctttttcccacccgtactcagacaaccaacacctatggagggcctgtgcgggagccgctgtgggaggcgctgcctcagagctggtctgataccctgttcctgccggtcctcctgccacattccctgccccttcctaagtcctgtgccggcctctcccagtccctcgaggctttcccggatgaggagcgcaatgagctggacagctgagctgctcaatagctctcctcaccttcaaagcactttataaatatgaattaatccacacaacacccacgagagccatcatgccctccctctacgaaggaaggtaccggaattgtcccagaaagcagatcatacctcagacagagaacaagtcttccatcctactcgcaagagtgaggcagagcctccccgccattccccatcttccatcctcctaacagcatcttccagccaattccccacaaatttccttccttttcccgaagaacaacagtagccaacaatcacaaccacagaaacctaagtttctctgagtagatgacttaattcttctgccagccccacctctgagactccagcagccatgaagattatgggccggtgttgacaaaaaggaataaattactgggctattccgaaaacaagcaagcatctgccagcaggcgctcactagcacacacggaggggtctgatgcggccccgagaactgaactgctctgatcaaacgcacacaggctgtcagaccagtggcttggtccctggtgtagagaatgtggggctcagatgagaaactgaggtaggctcatgctcacctggagacaggcttacatctccactgctccaaatactttcctggcccatagatggggcactgaatctataaagggcatgaaaatatcacaagagaatgaaatcgcccttggaaatgttgcttggggtaagagaagtgagctccaaaaagcaggctctagtaacaacagatggtcacgttctgccttccatgacggccaagccactgcaggctcttgcttggctcagcagggaaggtatgtttgacaccaggactaaattacttgggaccaaatggaggccgaagtggcaaagggagaggctttaaatacagcctctgcctctcctctaagtaagtcctaaacacacatataaagattttccagttgaagaggtgccagatgatcaacctgcctggggcacacgtatgtcttgatccagatctgcttggagaatcccagggaccaagaaagtgtcagagcacacctccacccccattttgggctactccgctcccatttaatccaatctaatcccatgggattgggaaaataaaaataaaaaaataaaataaaaaaataacaaagagaagatgatacgtgtttagcagaaagggtgattaaagacctagaggcattatgaccaagaaaacatggccgggcgcaggggctcacgcctgtcatcccagcactttgggaagccgaggcgggtggatcacctgaggtcaggagttggaggccagcctggccaacatggtgaaaccccgtctctactaaaaatataaaaattagccgggtgtggtggcgggcacctgtaatcccagctactcaggaggctgaggcaggagaatcgcttgaaccggggaggcggaggttgcagtgagccgagatcgcaccgccgcactccagcctgggcgagagagcgagactctgtctcaaaaaaaagagagcctcagagagagcatcatagcaaccccagggagagaaaggtaaggtactgaggggtgaaactgacattgctacattaatacaggcaaatgagtggcgcagacacaagaactgggggatgtctgaaaccatctgtcactccacagggaaaggactctgctcccatcagccccagggcccctggcagctgggatccaactcttctccttgaggcagacaaatcacacttaccgcagcccttcaggacttctaccataggagagatggagggtttgctgcccaaccctcatcaaatgaccaccaaacctgtgatggaagtgggcacactcctcctgtcaaaaccagaaagaatgaactgccaaccccaaaggcaggaagtgtgttcagggccgggcgcggtggctcacgcctgtaatcccagcactttgggaggccgaggcgggtggatcacgaggtcaggagatcgagaccatcctggccaacacggtgaaaccccgtctctactaaaaacacaaaaaattagccgggcgtggtggcgggcgcctgcagtcccagctactcgggaggctgaggcaggagaatggcgtgaacctgggaggtggagcttgcagcgagctgagatagtgccactgcactccagctccagcctgggtgaaagagcgagactccgtgtcaaaaaaaaaaaagaagtgtgtgaggggaggggctggctggcaggctggcaccttaggagcagagagccaccagcctcagtgggttcagacagcctcagctgtccctgcctgggctccaggcccagcccccaggtcctgcaagaggcacagggccaggttggggtcagagccattgaagccatttaccctgctggaccgtttcagggagaactctgcaacagaggaccatagagaatggcgtcccccattccgtgacatcccaagaccttgaataaactcagacatacccaggtggtactcgggatcctcctcattattctagggtacaacctgaattccagctcagccatttgttacttatgtgatcttaggtctatgatttatgctaactgagcctcactttcctactctgtaagagttgcagagttgtgagatttggagagaatggatagaaagtgcctagcacaggccgggcgcagtggctcacgccagtaatcccagcactttgggaggccaaggtgggaagatcacctgaggtcaggagttcgagaccagcctgaccaatatggtgaaaccccatctctactaaaaatacaaaacttagctgggttgtggtggcaggcgcccataatcccagctactcaggaggctgaggcaggggaactgcttgaatccaggaggtggaggttgcagtgagccaagatcgcaccactgcactccagcctgggcaaagacggagaccccgtctcaaaacaaaacaaaaaacaaaaaacaaaaaaaaaaaagaaaaaagaaagaaagagaaagtgactatcccagtgcctgccatacagtaggtgctcaggagacgctattatcattgttaccaggaacaatgctcagagagaggaaggcagggaacctctaacaccgagtcattcccatctctaagtcacactgccaccctgtgccctgggtataccccctttacagttcccgatggatctggcatttgtggagatttgtcaccccaggactgtgagccttgtaagcaaacagcttcctgagaagcagaggaacttcctctgggagccacaaaaccttgctgccaggcaaatgacagctcgggtatttgttttaatttaggctcttgtcaagaggaaagttgatggctaacagcccaaacatgactgcacagcacctccccgggaagcctcctgctacagctctccactaagctgttccgaagagggaggcagggactcctcacactgcggccacatcagtgccccctcccacccaccatccaggccaccccaggagccgcccagaggccagggcagcagcaggagggtagacagctcaggtgccaatctgcctgaatcagggctgcccaacagaaccccctaagaggccttggcctaattcccttttctggcattcctctggtcaggaattttcaaggtggcctcaggcaattttgcttttttgctccaggcgtgggaggaagagggtggggtatggaagacttggaaatgatcagctcagaggagtcttctgctgcagagaaagctagagacagggttccatacgattccaggcttcgggaaatagggaaacaagaactgggttttgcaaagagccagaaacactcaggaacataagcacgcgtgaatctgaggcattgttatgacggctgtttgcaagcacacagctaagagagggccactaatcctgcctccgggtcaggagctgatctgcatctgcgctccgaacagatgtgtgcccccattcatgcagacgcacgtgcacgcacatgccacacagccatgggccctgaccttcacccaacgacgctggcctctgcaggggaaggagcagatggagcggcggcacctggcacaggacctatgcccaggggatccggctttgcccctttgatgttgagaaaccaaagcagaatgaaccatcacaaggacagctcctggggggaggagaggaaggaacatggatggaggaggaggcgggtggagaagaagatacagggaatgacctggacccaaggggatgctgaggtcagaggttgaatgttgggtaccacacagcctccagagtaaggctttggggctcaaggcatcacccttctctactccccccaccccccccatatgacttatcaaggaactctagctgggatgacccttacaaatgcccttgttggctcacgcctgtaatcccagcactttgggaggctgaggcaggtggatcacctgaggtcaggagtttgagaccagcctggcctcatggtgaaaccccatctctactaaaaatacaaaaaattagccgagagtggtggtgggtacctgtaatcccagctactcaggaggctgaggcgggagaatcacttgaacccgggaggcagaggttgcaatgagcggagattgcgccactgcactccagcctgggcgacagagccgagactccgtctcaaaaaaaaaaaaaaagaaagaaaacgctcctgttccatggcatccagtgcctagaatcaggctgaaccaggctccacgtggccccacgtgcctcccccaactcctgcctgggagatgtgctgagagagtgggagggtcccactcacgtgggccaggaagggcgaaatccactatgtaagcccaggaggaccctcttcctaatccctgagagctttcgggaaaggtgtctcagggaagggtggggagaaggggcggtgcctttctagcaacggagcaggagcaaggtgcggtggtgggggcggggggcggctctcggttcgccccaagcccccccacaccattacccgtgatcagttacgcatcccccggggccatgcaagagcaatcacatgatccagagagatttgggagcgagggggtggagaactcgagaaggtttgttttttttttcttctgagggtggtggtgatgatgagggtgggggtggtgatgaggctggcaggaaagattgctgagcccgggattttcagctcccgcatccaaacggcccccgcggatatctgcaccccccgtctcccctcccacccgatcccaccccagcaccgaacccctgggccctgaaccacacatgacccggtgcccctggggtggcaaactcgggtgccaacgactgctcccaaaacggcctttcggcttcagcctggacagagaagctgccggtccaggggcgggggcagcacccagaagggcctccctcccctgaggctcgcggaggccgggttcacaacaggtgggaggggggacgcagctctcggctcggtccgcccacggtccccgcccccggaccgcaggaatcctctctggggaccccccgcccgcgccccccagaccagcccggctcctgggtcccgaccccgatcccgattcccaacccgaccccgatccggaccccgatctcgcccccgcccgcgctccccggaccagcccggtgcctgggtcccgatcccgatcttggggtcccgatcccgatcctggggtcccgatctccatcctggggtcccgatcccgatcctggggtcccgcccccgcccggcacacgtactgctgtagagggtgtcgatccaggacaggcgcggcaggccccggtggctgagcggctccatcccgcggcggcggctcggtcagatccgaaacccgaccctcatcgcgcaacaaaggagggagagcgggcgggagccgggggaggccgaagttgcgagcgcggaggggcgaggaggccgggaaccaggtccccgggaggagcgcggggcggccggggcaggggcgagggcggggcgggagcccccaaaaccctcccgaaccctcccggccccagcggccgcgccgagcccagctgcggatcccggaaccgatgagcaacttcgcggggggcggggcgggggtggggcttcgtggtggggcggggctttggtgcgggggcggggctttggtgcgggggcggggcggggagggaccaatcggctcgaggctccgccctccgcaggacgcccccggccgggctaagggggcagcggggctccggcgctgggcgaggaggggccgcgggggtctcggggggtctccaggcggcggcgcagacccaggtccccctcgtcccccccgcgccgggctcagcaggatcctggcgatccgcaaaccaggtgccgtggggggcccgggagcccacaggggtgacatcacctcccgcccgggatctccaagcgcggcttcgcgggcgggagcggcggccgggcccctccccagccagacccgctgcgggacccacggggtgaacgtcctgcgcgccgcgggacgcgcctctctcctcccgaaccttcccccgctcgtccctttccacacccctgacctctgagcgcggccgttcccgccacacatggaggggggcgggtggagacccgggaggaccgaagtcacgggggctgtggggccaggacagtcccacatgtgcccctcctgggcggaggacaaactggagccaggagaagccccaagggctccacgcgttcccctccaggacccctcctggggaccccgagccgcggcctggaaagcccatcgtgtttgcatcatcacctagaaatggtgggaagtcgggtcaagaggcctgagaaatgaccgtttagagacgaaattccctctaaggaagaccccctcgcccaagggcagtgaagagattgggggccccatgcctgtctcctgtgggctgattctgtgggagccatggcagcttccccacagacctctttgggccaagcgaccctggagcagggaaggacaggaggggagtcaggccaggggggtccagggcagtggggctgaagccccttcctgaacccagggaaagggaagcagtggggcccacccagggggcccggtaccccagatagtgacatttcagataccggagctgtctccaccccaccccatccccaggcagcttaaggggaaaacttctgggagcccagccctacagaggcctaccaggaaggttaagtcagcctggcctttgccgggggcagtgtggtcggcacccgcagaacgctggaggggtgtgggggtcggtcctcatcactccaaacagacacacacacatctagttcttaaggggagaagcagctcctcccccaggatgctgagaggaagccccataagctgcttgggcagaggcctctgcagctgccccaggggagatgggggtcacccactcatcacaggctggggagcccctgggagacgcacaggatgatgctctgggtggggaagcctctacaggtggctgcagcagaagtggttttcaatattattagcccgtccctgcgtccccagggctccctccgccccaatcctcctggctcaggcaccagcgctgtctcttgccgcccctccctgcagctgtcaccctcccaccgtccctgactagcacacaggattgggagggccaagcaggcacctggagcttggcagggagggggcgtgcatctccaatgagacgctccagaaatagagcttcggcatgggaagggaacgagcaggctctcggaggaccgcgaggccggaggagccatgaggggccaagggcatctcttcttcccacctggaactctcggaagacagcccaggggaaaggtggaaacgggcgtgagctgccgccaccaggagccaccagcccaggaggcagcagcaccgtcccctcctcaaaacaacaacaagcaagaacgctcgggccctctccccacactgtggggttttcctgatggccacatccggcgctgactgtgagggagctatggatgtatgcttctgcgtgagtcacatacatttgcgtacattttacatttttatctacaaaggcttgaacaagctattttcagcatcctccaagctaaaatgtggcagttgctttccttcgcgttgccatagtttgcttttttctgtctacattctgtccaatcctggcactctcggaccctccactccacaacacgatagagggtagagggagagacaaatcttgagggctctacagaggaaacttctgataacgaacacagaacaccgactgtgtgcccggcttagcgtttcgttcactagcgtgatctcaccgtgaatgtcactgttatctctgttttctccattttccaggtcagaaaaccgaggccctgagcagctgagtaacccactcagagggtaagtgagggctgggacttgaaccctggcactctgttcatgctctttttctgtttgtttgtttgtttgtttttgagacagagtctcgctctgtcgcccaggctggagtgcagtggcacaatctcggctcactgcaagctccgcctcccgggttcacgccattctcttgcctcagcctcccgagtagctgggactacaggcacgtgccaccacgcctggctaatttttgtatttttagtagagacggggtttcaccttgttagccaggatgatcttgatctcctgacctcgtgatccgcccgcctcggcctcccaaagtgctgggattacaggcgtgagccaccgcgcccggcctgttcatgctcttaaacaccacgcatactgcctccacggccagctaactggtgatcaccgggtgctgaaggtcctgagaaatctctgcgggtccatggggttagagaccaccctctgggaaaccctgtcaaccctcttccatctccagacgtctgtctcagacaacgtgtctcaggaaagggcagtcacttcgagattcccttgatgcctttgttggatggcttccagtagatgttaacaccacggccagatgctaaccttggccacagagacaagtgtgtgagcctttgagcaccacagtgatttgggtgggaacagaaacctccgcatccctggcactgaggagttggggagatccaacgtcacgcgctgggaaggaaggagttaaagagtccttctcctccgggctttgccaaaggtgatgctaccctgaagtgctctaaccccagcgatcaaccccaatctgtcagaggagcggggagctgtggcagacagaccttcctgattcagctaaatgtggaccgggtggggaccagccagtgctccccaaggcactgaacccccatctatcacgctgcctcctccaggccccttctaagcattccccagacagtccctggggccagtgctctccaccctcccagccctccctccagcctgtgcactcagactgtctgcggctctccaaccccagggtgacctgcctgctcctgcctcatcactggacttaaaggggatttcatggttgggtgcaccgccaggagcactgggttaatgacgaggggctgagtgggaagaaggtacatcccattttcaaggctatttgccctgctcctaattcccaagcacgtgctactcacggcctctccaacgaccaactcttgcttctaccaatcaaggtagaagccttggttcttggccaggacagaaaaaaggggacgggccctagaaccaaaactgggtatctccacatttcctcccttctcatgttagcagctcagctccactgcacacgacaggaaggccccaggagtctctgcttccttgatcacccagaggtcaccgctgatgacaaaaatatgttcccatgcgggggccaggcagggagccccggtgcgtgcagaggctgaatacacagtgggtgggagggagtggggccctctacattcaaatgaaaaaccaaaaccaaaaatagactgtgatgaccaaaaaaccgagagtttgcaccctcactggcccatcaggtccttaaaagctgggactggccaggcgcggtggctcatgcctgtaatcccagcactttgggaggccgagatgggcagatagcctgagtctgggagttcgagaccatcctggccagcatggtgaaaccccgtctctactaaaaacacaaaaattagccaggcgtggtgcatgtgcctgtaatcccagcagtgagccgagatcctgtcactgcactccagcctgggcaacagagtgagactccctctcaaaaaaaaaaaagccagagccgggcacagttgctcacgcctgtaatcccagtactctgggaggccgaggtgggtggatcacgaagtcaggagatcgagacgatcctggctaacacggggaaaccccgtccctactaaatatacaaaacattagctgggcatggtggcgggcgcctgtagtcccagctactcgggaggctgaggcgagagaatggtgtgaacctgggaggtggagcttgcagtgagctgagatcacgccactgcactccagcctggggacagagcaagactccgtctcaaaaataaaaaataaaaaaaccaggactgcatcttcctcactgggcagacccagtgctcagcgcagtgggtgaacaaggctcaggtagactcccagcacagctatgaccacatggtgcctccagatcagctttctgccgagcgcccagcagatcggcattcaataatgcacattgaacaaataaaattaatgacagctaacagttattgagtgcttttttttttttgagacagagtcttgctctgtcacccagtctggagtgcagtgggcattctcacagctcactgcagccttgaactcctgggttcaagctgatcctcctgcctcaccctcccaaagtgctgggattatagatgtgagccaccgtgcctggtctactgagtgcttcttaagtgtcaggcactgctctatctgctttacgtaggttatttcacgtaatccttacaataagccaatttactattatctccatttcacagaagaagaaattgaggtgcagagaggctaagccattggctaactagcagatggcgatgcttggaaatgaaccaagtctgaatccagggttcccgtgtgtaatctctgcattgagcggcaattagtgaatgaatgaataaacagaatgaagttaaactcagggaggaagaaatcggagctacacgagggaggcaggcagcgttatttcagaaccctcccagggccactgatgataaagtagaaagagaactggtatcccaagaaaaccatatctactacagcaggccagatgaccctggagacaagctgaacaaagtccagtgacaatctcccaaatgccagtcccggccaaaccccacttcttcaatgcctccggccaatctcaagagtttccagcctcagtgttcacatctgtagacagtatgcgcccagggccaggcacagtggctcacgcctgtaatcccagcactttgggaggccgaggccagcgggtcacctgaggtcaggagttcgagaccagcctggccaacatggtgaaaccccgtctctactaaaaatacaaaaattagctgggcgtggtggcgggcacctgtaatcccagctactcgggagactgaggcaggagaatcgcttgaacctgggaggtggaggttgcagtgagccgagatcgtgccactgcactccagcctgggtgacagagtgagactccgtctcagaaagaaataaaaaaaaaaaaaaaaaaaaaaaaaagaaggtatgtgcccaggtggatcaagaagacgacctccaggcctcctatgagcactagcagaatacaaactctcctgtcagatcctggggtggcctgttttccgtgctttgctctattcccatttccttggtacagtaaagcagcatttactattcttttttttctttcttttgagatggagtttcactcttattgcctggctggagtgcagtggcaggatctcggctcactgcaacctctgcctcctgggttcaagcgattctcctgcctcagcctcccgagtagctaggattacaggagcccgccaccacacctggccaattttttgtatttttagtagaaatggggtttcgccatgttggccaggctggtctcgaactcccaacctcaggtgatccgcccgcctccacctcccaaagtgctgggattacaggcgtgagccaccatgtgcggccagcatttactattctaagattcatcctcagccctccagtctggggaaagaagaaaattccccaggcctccacagtgtcacctgtaagggtgaagtctcagcctatgagtctgtcttttgccctcttctcacctgccctctgctcagcctcccggcttttccagcagccagtgagatctacaggcaacagaggtgaactggaagcccttcccagttagtcatttctgcaccaaacttttgtgtcagcttgagtcatgggaagacctgctgccctggcaagatgtggacctgctccccggggagctgcattcaccccctcactgcctccctaggcatcactgcaggataaagcacagtgacatcaggtccttgcagctgtgacactccccacacgcccccacacacttcccaggggccgagttgaagccccgttcccatggccaggggccacagcaagggcagcatcctgggcagagccgctggcttagattatgcactccccgagccaccgttttaggagggtctctcgccaagccccagctcacgtggccctcacctgacatggctcagatgacaccacccacaggtcaacagcagagttttcccaaagggtccgtccgagggctcgacagcagggcctggagccccctactcatttacttaccaccaagtccccatcagcattcagaaagacgccagcagaagagtccaatggattctctaagtctccaaaacccagagattcagttcagtggctccaatctccttagccccaagggaaacaagagcacgtccagctggggtcagagctcacgggctggccctctgccctcctgtggtcacgacggccccgaagctggccgtgctcctcgctcgttcagccagaattctgcagacgcatcccaggcctacgctgctctgccaggacctctgacaccacccaccaggctggccctgtccccatcaggcccaggagtggctgcaggagccgagggcaggctgtcaaggagacgggctccgagaggcagcggctcaccattcagcaaggcgagggcaaaggaacctcagagcctagccaggggcgcctgccatcagtggagcctctgctctggggctgccggtcgggccgtgtgtgctgtgtctctttaaggaccaggcctcttcaaggcaagttccctctgcagtccagtcctgcctctgcccgtcctgcggcagagagtgggggctccccagcgccatctggcggccgcacagcagcacctcggccaccagaggcttccagccaagcggcccgcaagtgcctggacaaaaatctccagcttggacacagggctgcaggctgctgttgggaacacagctgggggagtcaggaggagctccgtctgggaaggagagagcagaagcccccaggagtgacatggggagaatgatcatcccgccggacaaaaccttcactaaaatatcctcaaatgggccgggtgtggcagctcacacctgtaatcccagcactttgggaggccagtgtgggcggatcagctgaggtcaggagttcgagaccagcctggccaatatggtgtaaccccatctctactttaaaaaaatacaaaaagtagccgggcatggtggtgggtgcctgtaatcccagctactcgggaggctgaggcaggagaatcacttgaacctgggtggcggaggttgcagtgagccgagatcatgccaccgcactccaatctgggtgcgacagagtgaggctccctctcaaaataaataaataaataaataaaatattatcaaattgggccgggcacagaggctcacacctgtaatcccagcactttgggaggccaaggcaggcggatcacttgaggtcaggagttccagaccagcctggctcatgtggtgaaaccctgtctctattaaaaacacaaaattagccggacatggtggcgggcatctgtagtcccagctactcaagaggctgaagccggaaaatcacttgagatcgaggctgcagtgaactgagatcgtaccactaacaccccagcctgggagacagagcgagaccctgtctcaaaaaaacaaataagtaaataaaaataacaatgtgtgggagcatttaaagaggtcacaataggccagctgcagtggcttatgcctgtaatcccagcactttgggaggccgaggcgggcagatcactaggtcaggaatttgagaccatcctggctaacacggtgaaactccgtctctactaaaaatacaaaaaatcatctgggcatggtggcgggcgcctgtagtcccagctactcaggaggctgaggcaggagaatcgcttgaacctgggaggcggagcttgcagtgaaccaagatcgcaccactgtactccagcctgggtgacagagggagactccgtctcaaaaaaaaaaaaaaagaggtcacaataactaggggtcgctactagccttcagtaggcagaagccagaaatcttaaaatgtcctacaggacttgccctacagaacatctgttgtaagtgccaagagcgttgagaactctacctggttggggaaaacaggatggcggatggcgagttcccatctcacccccagctggtcctctttccccatcacactgctttggatgtccttcctactaaatttcgccttcataaacgtaggggtggatggagggggcagtctgacccagctgccttcacaagggaagccggtgcctctggctgcccctcccagaagccaggcacacacacccctgaaatcactgcaccagcttctcttaggctgagctgcacccaggacatgcaaattttccataaagcactttcgggttctgatcgtgaaacctcgtgactcctaatttcctcttccccaagctcttggcaccttgtcctgagctggtcagctcagtctcatgaacacacagtccggtgccaggagctggcacgagaaactagcacacatgactcgtgttctcccgaaaggagagtgaagaagggtgagactccggccacagtggccacgttttggctgggtccgttggttggagcagtcccaggctcacgagactgacatcaaagatatgaagatcaattagaggaaagagtttcccagtgtctaacagcaactgaaggcttgctctaagacatcctaaaacacatgtagcatgtcattcctctcttactaagacctgtctatggcttcctttttttttttttttttagacagagtctcgttcttgtcccccaggctggagtgcaatggtgcaatctcggctcactgaaacctccgcctccgagttcaagtgattctcccgcctcagtctcccgagtcactgctgtcgggatagagacccgcacatccttttggtggcctaaggaacctgtggccgggcctctgcacccctttcagcttcatctggcacattctgctccttgctctcttctactttttcctgccttggaacttttgcataggttgacatcgctggcaaaaacgctctacccccactctgcctgggtaactcctactctcccttctggtcttaacttaagtatcttgtcttccagggagctttcccgacccaccagaccaggaaggcctgcgtcgttccctgcttctgaatgctcaggactcttgtaaacgttcaatgcctgtctctcctgctagactgaggtctcttggaggataggaaccacatctgttattcactgtaaccccaggaccttgcacaaatagtttcagtgaatgaatgagcaagtgtgaatgaatgaatgaccaagcatattcctggtcacaaagagcctggaatgaggcagtacaggtgttccacccagcccacctccaccagctggaaaagaactgtttggctggttgagacgtcgcgtcgagaatgaccaccctctctggaaagatgcaaagaaagaacaaatggcccctaggatgggatttggggtgggagaattgctgttccaattaattctctaactgctcacaaaaaaccctaactgaaaattccccagtgcacagggttcccttgttcagcagccagtattggaggctgtactcctttctatccaatcaggctccaacatggaaacggcatagaaacccagaaatggttcagcccactaagggaacttcggtctcagttctcagagtccttctccgaggcctgtcccaaatttgcaataaaacttgtttttaggccaggcacggtggctcacgcctgtaatcccagcactttgggaggccgaggcgggtggatcacctgaggtcaggagttcgagaccagcctggccaacaaggtgaaaccccgtctctactaaaattacaaaaattagccaggcgtggtggtgggtgcctgtaatcccacctactcaggagactgaggcaggagaatcgcttgaacccagaaggcggaagtggaggttgcagtgagctgagatcgtgccactgcactccagcctgggcaagagagtgaggctccatctcaaaaaaacacacacaaaaaaacttatgtttcggggagggaggtaaacagtagctcttccctgggaagaaagcagtttctaggtgggtgcccgtcccgtctgctctcgccgtctgctgggattccgagaaagaagatgctggttgctcacggtatgctcaacccctctgccccacggcgctgcaggcgaagctgtgagtcaccagctcccaggaatgactttgatgaacctccaaccagacagatggaaaatctggctttcagttcaatgatgggagaaatatgatagaaatggattctgggccctcacgctcccaaggggctggcctgagcgagtctgcagggcctgacagacagggcttgggcacgacttctgcggctgcagattgcgctgggccatggtaaccaccacgccggcccgagggcgctatacagtgcgacaccagactccaggtctgctgggggcctgtgcccaggggagaggctcctttccatgttcccgtcaccaaaacaaagaaataaacaaaacaaccaatgtcaaatcaagatccggttctcgggcctcgagtttgtaaagatccagaaagccaccccagcagacggcggttggtctgccagcttcccgccagcctcccgccaagcttcctgccagcttctcaccagcttctcacccccgcctagtaacgatgttctggatgttccagcatttttcttttctttttttttttttttttttttgagacagagtctccctctgttgcccaggctggagtgcagtggcgcaatctcagctcactgcaacctccacctcccgggttcaagcgattctcctgtctcagcctcccgagtagctgggactacaggcgcccgccaccatgcccagcaattttgtatttttagtagaaacggggtttctccatgttggtcaggctggtctcgaactcctgacctcaggtgatccacctgccttggcctcccaaagtgctgggactccaggcgtgagcacctggcctgttctgacatattcaatagtgtcagggttcttctgtctcctgaaatgaggggcctgttgaaagcagtaggggtgtggaagaagaacagagggtaacatagaaacgaggcagcaaacacttgcacctgctacctgcgcccaggctgccgtcaggactctgcatgtattaaatcacttcattgtcaccgtgccacacgaccgctccaggagccacacatgagcccctcaacactctgctgcctttctccaacaggagggaaagagcgctcgaccgagcacagcctgaatccagctgctggttctgccactaacttgctgtgtgactctgaagaactgcctttccctgtctgtcccttgatgttctcacctcgacacgaagagatgtaagtcccaggcagtagctgataaaggaagggggaaactttcctgtttcccgcccttcagttcctatattccaggaagtttaatgggttttcagggctagaaaagttattattattattattttgtagagccagagtctcactatgttacccaggctggtctcgaactcgtaggctcaagcaatcctcctgcctcatcctcccaaagtgctgggattacaggcatgagccacggcgccctgcagaaaagttacttattatttcactgaatattccctgagccctactgtataaaccagagttccttttcccaggctgcttatgataatagacttcagacatgcccagaaatcacagagagggaaagacagacagtggtctggacagtgagttatggagggggcaggagggaggtaccacttcaaactgagctgatgactaaaagcttctagaaagaatgtgagctgggcacgggggctcacacctgtaatcccagcattctgggaggccgaggtgggcggatcacctgaggccacgagttcaagaccagcctggccaacatggtgaaatcccgtctctgctaaaaatacaaaaaattagctgggcatggtggaaggcacctgtaattccagcactttgggaggccgaggcaggaggatcacccgaggccacgagttcaagaccagcctggccaacatggtgaaaccccgtctctactaaaaatacaaaaaaatagctgggcgtggtggaaggcacctataatcccagcactttgggaggctgaggcaggtggatcacctgaggttgggagtttgagagcagcctgaccaatatggtgaaaccccctctctactaaaaatagaaaattagtggggtgtggtggcgggcgcctgtaatcccagctactggggaggctgaggcaggagaatcccttgaacccaggaggcggaggctgtagtgagccgagattgcgccattgcactccagcctgagcaaaaagagcgaaactctatctcaaaacaaaaaacaaaacaaaacaaaaacttgcacagaggcagacgtggaaatggagcgaagagctagaatggatgactgtggagaaggttcttttgggaactgggggcgaatatagaaactgctactaatctaacgtgtggcctcagcatgaattcaggaaaacaacagaattagcagcttttcttagatccaccttatagagaagcctttctgggacaccccctccccctcaatacccacaaggattcaggactcccccgctctcccggcgagtttgctgaacgcccttcggccgacgtgtcccgagcatcgccagtatttacgttctaggcaccctgttaagcacgtaaccttcactcttcgcaagcagcctctctatgtggaagccacagtcaccacgcccgctttacagaagaggctcaagttcacactgctagtgagtgacagagccaagttctcactcgggtctggctcggtccagagcaattgtacctggccaccagtcctgaagcttcaggaaagcatcctgaccagatgccgcccgacattcactcaggaagagctcggtttccagcacgccagggagtactggcaactgacgctaattcaagcacatcagtgcagccctttttgtttgtgtgtttttatgtttgagatagagtctccctctgtcccccaggctggagtgtggagtgcagtggcacaatctcggctcactgcatcctccgcctcccaggttgaagcgattcacctgcctcagcctcctgaataactgggactacaggcacccgccaccacgcccagctaattttttttttgtatttttaatagagacggggtttcaccgtgttagccaggatggttttgatctcctgacctcgtgatctgcccaccttggcctctcaaagtgctgggataacaggcgtgagccccgcgcctggccactgcagctcttaaagcttactctccaggggaagtggcagaggaaggaagacacaaagatgaatttccatcctctttctcctctactgaaatctgacaagctcctgggtcttttgatttctccttgaacatgaggtttgtacctggaggatctctggtggcaagggtgtttcctttgtttttttttatttatttatattttgattgattgattgagacagagtctctctctgtcgcccaggctggagtgcaatggcacgatcttggctcactgcaacctccgcctcccgggttcaagtaattctcttgcctcagcctcccaagtagctaagattacaggtacacgccaccacgcccagctatttttttgttttgttttgtatttttagtagagaggggtttcaccatgttggccatgctggtctcaactcctgacctcaggtgatctgcctgcctcgtcttcccaaagtgctgggattacaggtgtgagacacttcgcccagccttctttattttttagagacaagtctcactctatcgcccagactggagtgtagtggtgcaatcatagctcactacagtctcgacctcccaggctcaagccatccccctgcctcaacttcttgcatagctaggactacaggcatgcaccaccacacccagctaatttttttttttttaagatggagtctcgctctgttgcccaggctggagtgcagtggtgcggtctcagctcactgcaacctccacctcccgggttcaagcaatcctcctgcctcagcccccctagtagctgggattacaggcatgtgccaccatgccctaaaaattttgtatttttagtagagacagggtttcgccatgttggccagactggtctcgaactcctgactcaggtgattcacccacctcggcctcctaaagtgctggaattacaggtgtgagccaccgcgcccgaccctaattttttttttaattttgtacagacagaacctcactatgttgcccaggctgctcttgaagtcctggcctcaggccaggcgcggtggctcacgcctgtaatcccagcactttgggaggccgaggcgggcggatcacgaggtcaggagatcgagaccatcctggctaacacggtgaaaccccgtctctactaaaaatacaaaaaattagccgggcgcagtggcgggcgcctgtagtcccagctactcgggaggctgaggcaggagaatggcgtgaacccggaaggcggagcttgcagtgagcggagatcgcgccacagcactccagcctgggcgacagaatgagactgtctcaaaaaaaaaaaaaagtcctggcctcaaaggatcctcccaccttggcctctccaagtgctgggattacaggcgtgagccatcaggcccggcccttaagggtgttttctactgctacagtgattaactagtctctggtgtatctctctcccaaaggcagcccccagccctgcctgacccaggctcagcaagtagcgtaaggagcattttaaagaaaattattggctgggcagtggctcacgcctgtcatcccagcactgtgggaggccgaggcgggtggatcacgaggtcaggagatcgagaccatcctggctaacacggtgaaaccccgtctctactaaaaatacaacaaattagccgggcgtggtggtgggcgcctgtagtcccagctacacaggaggctgaggcaggagaatggtgtgaacccgggaggcaaaggttgcagtgagccgagatcgtgtcactgcactccagcctgcgcaacagagcgagactctgtctcaaaaaaaaaaaattattggccggcgcggtggctcacgcctgtaatcccagaactttgggaaggcaagttgggattgtggggagagatcacttgaggtcagggatcacttgaggtcaggagtgcgagacgagcctgggcaacatggcaaaaccccatctctactaaaaatacaaaaattagccaggcatggtagcaggtgcctgtaatcccaggtactcaggtggctgaggcacgaggatcgcttgaaccaagaaggagaaggttgcagtgagccgagatcacgacactgcactccagcctgagcaacagagcgagattctgtctcaaaaaaaaaaaaaaaaataggcaaggtgcggtggctcacgcctataatcccggcactttgggaggccgaggcaggcggatcacctgaggtcaggagttcaagaccagcctggccaacatggcgaaaccctctttctactacaaatacaaaaattagctgggcatggtggcacgtgcctgtaatcccagctactcgggaggctgaggcaggagaatcacttgaacccaggaggtggaggtcacagtgagctgacatcacaccactgcactccagcctgggtgacaagagtgaaaactctggcccaaaaaacaaattaattaattaaatttaatttagaaaagatttcttagctaacttctcagaggaacataggacaaaactgggtattaactctacatcctgcctcacccaccccctccctaaatgttgatgactctgttgccctgggcttaccaaagagcagccacacacacagaactttctgaaaaatcctgtcagtgctctgaacaaggctcgagtccctgggagaagacggcaccacaggaagctacaggagatccaaccttccttttttttttttttttgagacggagtcttgctctgtcgcccaggctggagtgcagtggcgcgatcctggctcaccgcaagctccgcctcccgggttcatgccattctcctgcctcagcctcccgagtagctgggactacaggcgcccaccaccgtgcccggctaattttttgtatttttagtagagatggggtttcaccgtgttagccaggatggtctcaatctcctgacctcgtgatccatccgcctcggcctcccaaagtgctgggatgacaggcgtgagccaccgcacccggccaagatccgccttcctaaggaaggaccctgtgctgctcagaaaccttcccaaatgctccgggaaccccggctcccctgcagtgcctcctggacagacgcatcctgcaacgctccagagggtatcggatctcgggggcatctctttcttcaaggcagcccccagccctgcctggcccaggctcggatgagcattgcaaggagcactttaaggagagtcactcctatttcagagcctctgggaaacaggccgtgatctcctgctgtggcgcagggagggtttggctggaggctctgagctggagccacctccacttaatgctggagtgaatgatttcaaacctctgtctctgcgggtttgaaaaaaattgggcagggtcagccccatgccccatttttggtctgagaggttggagagagaaagacaccatccctctggctcctgaccggtcattctgaagccttgagctctaggagcctcctcggatcttagccacagctctgatgaaacctcaccctaatccccttctcgtggcccacagccttctagacactcattgcccaaacccctgcatgagttattttcccagttgctgtttctgtctgattgtgaaagattctttcctcccaaaagccacatgcctgtcacatgaggggagtgccagaccaccagcagagagggggagggtgctgggaagtcttctttcctggaccccaggctggtcccctgagtcttggggagtggctcctgattgctccctatagccaacatcccagggagcttgggatcacactggagggaagatcagcgctcacccaaaccagaccgtgacttggttttccccagagagcagtatctatggtgtccccacctaagacctaactggagctgggctcctcagaccactggctttgggggcaaatacaccctgctgactgtcagatcaaagccatgctgcaggcagctgagacaggaacactgccgctgctgctgcgcccggctggccgcagccccacgctgtgggttagttctttgggggccctaaaggagagctgagctgtcgccttctggacataaaggagctgcttttgcaaaagagactgtatctgccccctgccacaactaaccagaaatgaggaagctgccacagagaagcctcccagtctctggggctgcgggttctgtctgctccccctcccagaggccacacatgaggctgtacatgcaggcaggccacatttccttccaggcccacaaacaacctcgacttcctgcaaagaccactaaccccaacgtcggtacacgtggcacgttgcccaaggccgagctgctgctgatttttagtgtgactttcaggaccaaaaaggaagaggttctgtctggacaaggagagcttggcctgagacaccaacagacggcaacttcccacctggcctctgcctgattctgcaatcaaagctgcctggttccggccaggcacagtggctcaaacctataatcccagcactttgggaggctgaggcgggtggatcacctgagatcaggagttcgagaccagcctggcctcatggtgaaaccccatctctactaaaaatacaatattaaccaggcgtggcggtgtacacctgtgatcccagctacttggttttttgtttttgtttttgagatggagtctcgctctgttgcccaggctggagtgtagtgatgccatctcggctcactgcaagctccgcctcccgggttcacgccattctcctgcctcagcctctccagtacctgggactacagttgcccaccaccacacctggcaaatttttttttttttaatagaggtgggtttcaccgtgttagccaggatggttatgatctcctgaacttgggatccgcccgcctcagcctcccaaagtgctgggattacaggcgtgagctaccgcgcctggccaatcccagctacttgggaggctgaggtagaagaatcgtttgaacctgggaggcagaggttgcagtgagccgagacggtgccattgcactccagcctgggcaacagagcgggactctgactcgaaaaaaaaaaaaagaggtgcctggttccaaggacgaggccctatctcctcccagaccttcattcctctgagggggccggggaaggtgtgaaaactttgctcgggagtggtcagggtcacgaatgcctggttctggaaaacaaaacctctctctggctctgcaggtgccagggaagactgggggaaacagaggcagtgagccagggcccggctaggaagatcacccgggctgctggctcagaagccacgctgcaattaacacactggcaggggctcatctgtacccatgtcatagaccaccaagaggccacacggaaggtacaaaacatacaggctgttggggtttttgttttctggtttttttgaaacaggatcttgctctgttccccagctggagtgcagtggtgcaatcacagctcactgtagctggtgggatatttttgggggtggaagggagagacggactctcaccgcagcctccccctcccgggttcaagcaattctcctgcctcagcctcccaagtagctaggattacagacgcccgccaccacgcccggctaatttttgcattttcagtagagacagggtttcaccatgttggccaggctgacctcagttgaactcctgacctcaggtgatccacccacctcagctgcccaaagtggtgggattacaggtgtgagccacagcacctggccaattttttaaaactataagtttattcagttttttttttctgtcatataagtcataaagccagaattttaaaaacttttagacaataaaagagtaaaatgtgacccataaaatacaccaccccaattagcattttccagctttttttgtatgcatataatagagctcttttttctttttttttttattatactttaaattttagggtacatgtgcacaacgtgcaggtctgttacatatgtatacatgtgccatgttggtgtgctgcaaccatagagctctttacaaagttttatagttggccttctctacctggctggaagccacactatccctatccaagggcaccctcagattcaaccaaccacagatcaaaaatatttgggaggaaaacaattaaaaaaaaacaccacaaaaataaaaaatacaaataatacagcataacaaccacatagcatttgcaatgtattaggtattaaaaataacctagagataagttaaagtacacgggggtcgggggcaggcatggtgactcacgcctgtaatcccaacactttcggacgatcgcttgaagccaggagttcaagaccagcctgggcaacatagcaagacactgtctccattaaaaaaaatttttttaaataaagtctatgggagacgtgattaggttacatgtaactattacagcaccttatataagagacttgggcgtcctgggattctggtatctgccaggggtcctggggccaatcccccatgaaaatggagggacaggtgtaattggagtggctctccagactgtgcccaggaatttctcagcctgatctttggccagtccagcttcattttctcccctcctcccgttacatcaagcagaacaagtttcacctagatgagctatgacctcactttattcggggcctccgtggtgcagacacaaagatggatccccaggtggaaacccgggcacgtcatcccggtttgttcatggtgcaagatgtctccggttacttcggggagacaggaacatgacctgggttatcagcaccgtccagggacaccagagataaagcctcatctataacatccccagtaaaaagctgagaattgctcctgacaaggtcctggggctcttccttcctctgggcagggctacagcttagagactgggagaaagccttggggttggccagggacacccacctgcctcaggaggggctgtgttaatgacatcagcctttcagcaatggaaactaaggaggatggggggaggaaagtacaggaagacttgtaaagggaaagttctgtttggattcagggcccaagccccaaaccctgataggaataaaatgatcagaggagcagccggggaggctttggtgcccctcaggcagccgcatcactcaagactgttcacatcagcaatagcttcacggggccggtgtccacgaggctgctgctccggatgcaaagcacaatgctttaggtcaggatgtgggttctagagacagaacagacccggttcacggcctggtgtcacgacgtattgaacctctctgagcttcagtctcttcagtaatgacggtaagtgctttaactgagattgttaacaagacccagcgagatcgtgaaaagaagacaccccgcacagcgcctgttccctcgttagcactcacgcagtatcagctattatcatcatgctggctgacttttatgtgagcgtgtataacacgggtacacacacacacaacacctctctccggagggtaaaaacaagacaaaaagtgaaacaggccccccgatgccgaagagatgacggcaaccccgatattgtgcgtggtgtgaaggtcaccaaagcaaaaccacacgctttgttttctgggggtgtctcattgacagtgcagaggtagcttactagcatttttgcttgtttgtttgtttttttgagagagtctcgctctgttgcccaggctggtgtgcagtggcgtgatctctggctcactgcaacctctgcctcccacgttcacgccattctcctgcctcagcctcctgagtagctgggacaacaggcgcccaccaccacgcccggctaatttttttgtatgtttagtagagatggggtttcaccgtgttagccaggatgctctcgatctcctgacctcgtgatccgcccgcgtcggcctcccaaagtgctgggattacaggcgtgagccaccgcgcccatcctgcttactagtgtttcttaaaaagtcaaagcaacgctattcttcataagtgtgttcctcccatactttgctattcaagagcagctagattaagagaaagaagatccatctagaaaaacataatccctttgcctccttttatttatttatttttcgaaacagagtctggctctgtagccgctctgttgcccaggttggggcaccaccatgcccagctaatttttgtatttttagcatagatggggtttccccatgttggctaggctggtctccaactcccgacctcaggtgatccacccccttcggcctcccaaagtgctgggattacaggtgtgagacaccgcacctggcccaagaacctctttataacagatgcagccataccagagccccagagcgcacattcaaaagagaatctccaacctcttattactcatcttagatcactcattctaaattgcaaattcaaaggggatcccggctgtctctttcctatactcttcagcgaacagtccccaaacacacacgtgcccactcatgatgaagttgcattcagagtatttcccctatggacaaagaggctcagattcctgaccctcttctgaaaggccccagctgcccccttttcacatcttcacatatgagctggcagcaaatgttgcatgaaatgaagaccctgttaggaaagggaaggtgatccatagccatctactcctaatccgctgacccttgatgaaataggcctaggtttagggttaggaaacactgcggctagaaacagagaccttggagacaaatggccctcttgtttcaacaaggaagcttctactgcttgggagaaagtggtcagctcagctctcctcgaaccctactatttaggttggtgcaaaagtaattgctgtttttgccattactttttttttttttttaagatggagtcttgctctgtcccccaggctacagtacagtggtgtgatctcggttcactacaacctccgcctcccgagttcaagcaattctcctgcctcagcctcccaagtaggtgggattaaaggcatgcaccaccacgcctggctaattttgtatttttagtagcgacgaggtttcatcatgttggccaggctggtctcgaactcccgacctcaggtgatccgcccgcctcggcctcccagagtgctgggatgacaggcgtgagccatcgcgcccagccccattccttttaaaaggtctttcacttgccggtgtgagcagaggatcctggggagactccttggaaggggcttcggatccagccaggctcccgcgcagtcctcagggggcgtggcccggctcgtgggggcggagtccatggggggcggggtccgcggggaggagcctgcggggcggtcccccgtgggggcggggccttgagggggcggggcccgcggggggcggagtctgcgggggcggggcccgcggggacggagtctgcgggggcggggcccgcggggacggagtctgcgggggcggggcccgcggggacggagtctgcgggggcgggggccgcaggtcctggtcacgtgatgaggctgcggtaagtcgcccgggctgcctagtcctccaggcgcggttaatccagtcgggaacccctgagtcaccgcccgccgccgctgcgaggagcccggcgagtgttcggcctcggtttctgaggtttcggcgggagcggtgatgcagacgccttcagggcccgggtcgtgtccgtgactcgcgcaggaaggcggatggcgccccccgggcctgcctacaccctgggaacctcgcggggcgaagggggctcgggcgctctctccgcgtggcgagagacccgccagggggtgtggcgtgagtgtgtgtcccgccaggacgttccggtggcgccgcctgacgcgggaggagaaaccagctccagctcctcatctggattttacataaatccatggctcaaagtgctttcctgtccggacctcggtgccggcttcacgggggaaatccctggagccgaggggagggcacgagaaaccaccgacccccggcccacgggccagcccagtccactcctcccggcctctccctcatctcggcctgggccccgcagaagccaccaccagggctcctggattccaccaggggcatcttagtccccagcggggcatttaaagacttaatgtgggccgggcgcggtggctcaggcctgtcatcccagcactttgggaggacgaggcgggcggatcacctgaggttgggagttcgagaccagcctggacggcatggtgaaaccccgtctctactaaaatacaaaacattatccgggcgtggtggtgcgcgcctgtaatcccagctactcgggaggctgaggcaggagaatcgcttgaacccgggaggcagaggttgcagtgagccgagattgcgccactgcgctccagcatgggcgacacagcgagactctgtctcaaaaaacaaacaaacaaaaaaaatgagaaacatgggttcaaactacagtcctgagccatatgacctgaaaggactatatatacaaaggtggtccagaagattataatcctgtattttttcctgtaccttttgtacgcttagacgtgttcagatacacaaacattttccattgtgttacaacggcctatagtattcagtatagtgacctgctatacaggttcgtacctaggagcagtaagctgtctatatcatatatcatatctatatcacatagtgggctataccattgagcctactatgtacctgggctgtatgttagtatttaggtttgtgtgaaatatacagccaggtgatttttgtatttaggtttgtgtaaaatatactatgatgcttgcacaacagtgaaatcatctacacatttctcagaacctctttttttcttttctttttctttttcttttttttttttttttttttgagactgagtctcgcgctatcacccaggctggagtgcaagggcgtgatctcggctcactgcatcctctgcctcctgggttaaagtgattctcctgcctcagcctcccaagtagctgggataacgggtgcaccaccacgcccggctaatttttgtatttttagtagacatgaggtttcaccatgtaagccaggcagctctcaaactcctgacctcaggtgacccgcccacctcagcctcccaaagtgctgggattgcaggcctgagccaccatacccggttttatccccattattaagagactgtaatgagctctgggccctttggcacattacccaatattcttaagccttagttttctcatacatcaaatgggggctaataatacaaacctctctggttgtgagaataaatgaaacagtgcacaaatgagatacaaatacttctaagcatgccgtgaaaggcctgagaatgtatcatctgtaacagcctgttctgtaggctccttctggagagaggagtggggtcggggggagaggtgacaggaaatgacaggcttcatttccaagatttcagtagcgtttgaatcttttctattgaaaatgcattggctgggtgcagtggctcacgtctgtaatcccagaactttgggaggccaaggcaggaggactgcttgacccagcagtttgagaccagcctggacaacatagtaagacttcatctctacaaaaaataccaaaattggccaggcgcggcggctcacgcctgtaatcccagcactctgggaggcccaggcgggcagatcacaagatcaagagacggagaccatcctggccaacatggtgaaaccccatctctgctaaaaatagaaaaattagctggatgtggtggtgcatgcctgtagtcccagctactcagaaggctgcggcaggagaatcacttgaaccaggaggtggcggttgcagtgagctgagattgcgccactgcactccagcctggcgccagagcaagactccgactcgaaaaaagaaaaaaaaaatacaaaaattagctgggcgtggtggcgcgcacctgtagtcccagctacttgggaggctgaggcaggagaattatttgaacccaggaggtggcggttgcagtgagctgagatcgcgccactgccctccagcctggtgacagaaggagactccgtctcaaaaaaaagagaaacaaaattagctgggtgtggtggcacactcgggaggatcacttgagccagagaggttgaggctgcagtgagctctcatgtgaccactgacgtcacatcactgtgatgggttagacactgatgcgtttatagtgtaactgccacgtgactgggttgttgcgtgcacaaccgagcatcccttgaccccttagatcacacagggtttatcccaggaatacaagcctagctcaatattagacaatctgcatgattcactacattaatttattattattaatattagagacaggttcttgctctgccacccaggctggagtgcagtggcactatgacagcttacttgcagccttggactccagggctcaagcggttctcctgtctcagcctcctgagtagccaggatgacaggcatttggaaactgaaaagtggaaataaccagctttcgtttctgggctgcagcttgtttagtgccacatcttggagaaagctctgtgcttgtggttagatgggttgatcttgaatggccaaggtgggtggattgcttgagtccaggagtttgaggctagcctgagttggtctgcaaaccagctcaccagatattgggtttcaccatgtctccaaaaatattttgtgaaatttgtgaaactccatctctacaaaaacatacaaaaattaggctgggcgcggtggctcatgcttgtcatcccagcactttgggagaccaaggtgggtggatcacctgaggccaggagttcgagaccaccctggccaacatggtaaaaccccgtctctacttaaaatacaaaatttagctgggcgtggtggcatgcgcctgtaatcccagctactcgggagctgaggcaggagaattgcttgaacccgggaggtggaggtggcagtgagctgagatctcaccactgcactccagcctggacaacagagtgagactccatctcaaaacaaacaaaaaaaaaagccaggcattgtggttcgtgcctatagtcccagctactactccacaggctaaggtggaaggattgcttgagcccaggagttcaagggtgccagtgagctgtgattgtgccactggcactccagcctgggcaacagtgagacgtgtctcaaaaaaaaaaatgtgaacagattctctcaaaaagaagtaaggtgagaatataaattggatcaacttttctgaaggataattttacaatatctatttgtatttaaaatgcatatatttggccgtgtgcagtggctcacacctgtaatcccagcactttgggaggctgaggcgggcggatcacctgagctcaggagttcgagaccagcctggccaacatggcgaaaccccatctctgctaaaaatataaaattagctgggaatggtggcaggcgcctgtaatcccagctactcaggaggctgagccaggagaattgcttgaactcgggaggtggaagttgcagtgagccgagatggcgccagtacactccagcctgggcaacatgagcgaaactccgtctcaaaaaaaaaaaaaaaaagagaagtgggggaaaaaaggaaactgttggaatcacagaccttatgactttgtaattccttgcacagcctctcttagaagatcagtaactttgttttttgtttgtttgttgttttgtttttgagacagagtctcgctctgttgcccaggctggagtgcagaggtgcgatctcggctcactgcaacctccgcctcccgggttcaagcgattctcctgcctcagcctcccgagtagctgggattacaaggcgcctgccactgcaccagcctaatttttgtatttttagtagagatggggtttcaccatgttggccaggatggtctcaaactcccgacctcaggtgatccacccgcttcggcctcccaaagtgctgggattacaggccggagccaccgcacctgtccagatcaaccactttggggccattgatatcagagatggcctccctgctcttgtctaggaatgagggtgtagcagacccattgagttatgagtgtttataaaagagaagttgctcgacccccagatgagtccctgggtggaaaggaaatggtggatactagaacttgttcttcctggccttcctgggcaactgacacacaggaggcagctctgcctgtgacccgaaggaactaggtgtcaggagcagcaacgcagggcaccccagtgtgaagtgcccttggccagctgaggaattgacattctcctctccaggaacagcagcagcatgtgctgcgtctcgatcgggtgattcccacaccatcactgcatgccacggtcccctgtcagcctgtgaagaaccagtctcagagccacatctgtggcagagaagtccttgctactaatgagattcgagttctctgctaacgtcgcggtagagaagtgctgaccactgctcccttgttgactctgtaagggagaggttcaagagggagctgccggccgggcacagtggctcacgcctcttatcccagcactttgggaggccgaggcgggcggatcacgaggtcgggagatcgaaaccatcctggctaacacggtgaaaccccatctctactaaaaatacaaaaaattagccgggtgtggtggcgggcgcctgtagtcccagctactcgggaggctgaggcaggagaatggcatgaacccgggaggtggagcttgcagtgagccgagatcatgccactgcgctccagcctgggtgagagtgtgagactccgtctcaaaaaaaaaaaaaaaaagcctgctttgtgcctgccaagtcagttaaagacggcaagtgcttagtatgggtctctcttgtacatacatgtatgtagtgaacacctgtttgctagcctagtaccacagttacactgaaggctcctgaagcagaattttgaactctttcccttggttcactgctcggctcaatgcaggtgccaataaagtttgccttcatggtgcctgaatccctttcttccggatggagttcatgggagcttggaattgatagagttcatgggagcctggaacttacagtcataaaatcagacatacagtgttttactctctgcagctgcgttgaagtgggtggtgttttattgttcacatccttctcttttaacctgtttgtttctttctttttttttttgagaccgtcttactctgtccttcaggctggagtgcagtggtgtgatctcggctcaccgcaacctccacctcctgggttcaagccattttcctgcctcagcctcccaagtagctgggattacaggcatgcgccaccacgcctagctaatttttgtatttttaatagagacagggttttgccatgttggccaggctggtctcgaactcctggactaaggtgattcacctgtctcggcctcccagtgagccaccatgctcagccaaagtttgcttgaatggtgcctgaatccctttcttccagatagagtttatggtagcccagaactgacctctcgtggtcataaaatcagacatacaatgccttactctctgcacctgctttgaagtgggtggtgttttattgtccacatccttctctcttaactttctaatacttggtgacgtggacaccccacacacatacgagttacacatatacatagataattatactgttttgttgacctttttcattgagcagtttggaggtataatcactctaaattttctgcagcaattcttttaagcactggaaaaagttgcatttatcaaagtccagcaggtatccccagttatttacaaattcagcaaatttacgaatcacaacaaagctgccatcttaactccacgatgatctttgctgctgaagaaaacagatacatatgccaaagtgccttcagaacctccaacaaattaaaaaaagaaaacacatatctttcatggcaaagacacctaaattagtaaagcactaaattagtgacggctgatctcttagagagacagggagaaagtagaggtagaaagtaacagaatctagagaggcggaagctcagcccagctgtgttggtactgtgggggctgtcactttttacctgcgtagaaagttctgacctaagccgggcgccgtggctcacacctgtaatcccaactctttgggaggccgaggtgggtgaatcacctgaggtcaagagttcaagaccagcctggccaacatggtgaaaccccatctctgctacccagcttctccgcactatcgtccacgttatcactcagcttctctgcactatcgtccaggtgtcactcagtttctccatgctgttgtccgcgtatcactcagcttgtctgcactatcgtccaggtgtcactcagcttctctgcactatcgtccaggtgtcactcagtttctccatgctattgtccgcgtatcactcagcttgtctgcactatcgtccaggtgtcactcagcttctctgcactatcgtccaggtgtcactcagctttctgctattgtgtttgctctcaagccaaaaatcactttgggctgtttcctctctctctgcttcctggctcctaacacaaaaggattactttatcactttatcaaccaactggcaactcctatctactcacacacaaactcaaaagggctttttcctccatgctttgcttagaccaaccttagcctcttaaggacatttagaaccgtatttttgcatccttttaacatcaacctgtagggccagatggacggaaagggccctatattttaaaggtgccagacatttaccacctcatatcaagcacttggcaaagcctgccaaactctggggtgctggactggctgctgaaaaatctcccgagcttgttaaaaacagagattcctggccgagcgtggtggctcacgcctataatcccagcactttgggaggccaaggcggacggatcatgaggtcaggagtttgagaccagcctgtccaatatggtgaaaccccgtctctactaaaaaatacaaaaattagccaggcgtggtggcagacgcccatagtcccagctactcaggaggctgaggcaggagaattgcttgagcccaggaggcagaggttgcagtgagcagaaatctctccacttctttccagcctgggcgacagagtgaggctccgtctcaaaaaaatgaataaataaataaataaataaataaataatgaaaaataaataaaaatatggattccaggttttgctctgacccagtgggattccatttcagtggagctagccaccaaaaatcgatcttcttctgctgttcctgcagaggtgtctgacttgcagtcagtccttatctaaattattccaggtcctgtggcaggtgcttagaaaacaaagcgtgaatcataggagtcattattgattgattattcaccgtgatttttttaccatagatttcctcattaatccccacaacattccaggaaatagacactattaacacatccattttacagataagatatccaaggcacagagacgtgaaataacgtttttaaatcctcacagctagtaaggggtagagctgaggttcaaacgtgggcagtctgaccccagaacctgcatcctttactgccataaggtggtatctgccttcagcaatgctagcaaggtgggaacaatatgtaaattactgtaacaaggccggccacggtggctcatgcctgtaatcccagcacttcgagaggccaaggcaggctgattgcttgaggtcgggagtttgagaccagcctggccaagatggtgaaaccccgtctctactaaaaatacaaaaaattagcctggtgtggtggcacaagcctgtaatcccagctactcgggaggctgaggcacaagaattgcttgaactcgggaggtggaggttgcagtgagccgagattgcaccgctgcactctagcctaggcgacaagagcaagaccccatctcgaaaaaaaaaaaaattactataacaagaagaagaatgaaacagtgttaaactgagatacaaagaggctgggcatggtggctcacgcctatagtcccagtactttgggaggccaaggcaggaagatctctcgagtctgggagttcgagaccagcctgggcaacagagcaagacctcatctctacaaaagttttataaggattagccaggtgtggtggtacatgcctgtggtcccagctacttgagaggctgaagtgggaggctcgcttgagcacaggagtttgaggctgcagtgagccctgatcatgccactgctctccagcctgggcaatagaccatgacactgtctcaaaagagaaaaaaaaacaacaacaaaacaaaacaaaaagagacgccaggcacagtggttcacacctgtaatcccagcactctgagaggctgaggcgggcggatcatttgaggtcaggagctcgagactggcctggccaacatggtgaaacctcgtctctactaaaaatacaaaaattggccgggcatggtggctcacgcctgtaatcccagcactttgggaggccgaggccagcagatcacctgaggtcgggagtttgagaccagcctgatcaacatggaaaaactccatctttactaaaagtacaaaattagccaagtgtggtggcggacgcctgtaatctcagctacttgggaggctgagacaggagaatcgcttgagcccagaagttggaggttgcagtgagccaaaatctctccacttcactccagcctgggcaacagagtgagacactgtctaaaaaaaaaaaagagagagagagataaagagatacttggggagaagctgtatctgggatgggaatttggacttaagaaatttttcacccttttaccaaacagctaaaggagtgtgaaattcccccaacaaatccttgaatggagctgcagacaatcagagtcaacccatctaaccacgcacagagctttctccaagatgtggcactaaacaagctgcagcccagaaacgaaagctggttatttccacttttcagcttctaaaacctgttaattttgtaatatgctcagggtgggagacagctcagcccaggaaatgatgagatgtgaagctgcagattctgtttttctcccaaacactgtgccggccattaattcacctaaagaccatgatttgagacccaactagcaaactaaggggcatccaaagagcaggaagacgtggccatagtttaggtgactaagcaggtactatttggtgtgaattaaggctgcagagcttgaaggtcacagtcttttttttgagacggagtctcgctctgtcccccaggctggagtgcaggggtgcaatctcggctcactgcaacctccgcctcccagatccacaccattctcctgcctcagcctcctgagtagcttggattacaggtgcatgccactatgcccggctaatttttgtatttttttaagtagaggcggggtttcaccatgttggtcaggctggtctcaaactcctgacctcgtgactcacccgcctcggcctccgaaagtgctgggattacaggcgtgaggcaccacgcccggccaaaggttacggtcttaactcctaagtccttctgtgctagcttctcagagattgcacgcaaactgtgcaaagatactgtcttaaccccacagtgatttcacttcttcaaagatgacagactctatggttccaaagcgacaaaactgtgaaaacaaggcagtctaaggtgctgtttctattttggagagatgtgaaatggtttgttttttgttttttgagaccgagtctcgccctatcgcccaggctggagtgcaatggcacaatctcggctcactgcatcctccgcctcccgggttcaagtgattctcctgcctcagcctcccgagtagctgggattacaggcgcccgccaccacgcccggctaattttgtatttttagtagagaagaggtttcatcatgttggtcaggctggtctcgaactcctgatcttgtgatccacccgcctcgggctcccaaagtgctgggattacaggcatgagccaccgctcccggcctgagatgtgaaatgttacacaggacttggacttccccgccccccaccaccaccttaaacctaaagataagctaacttcaggtcccttcaacctaaaatgaacatttattttggctttcatcagtttttggaatctatgatactaggatgtgtgtgtatatatatatatttcctctccatgagtaaccaccaccccagggatgacttaggcaaaatatttaaattattccttaacaagtttaaattaccctaacaatgctgaatatctacagttaatagcaatttaaaggaatataaaggagagatttaagatttgaatataaaaattctgatcctggccgggtgcagtggctcatgcctgtaatcccagcactttgggaggctgaggcaggtagatcacctgacgtcaggagttcgagaccagcttgaccaacatggagaaaccccatctctactaaaaatacaaaattagccaggcgtagtggcacatgcctgtaatcccagctactcgggaggctgaggcaggagaatcgcttgaacctgggaggcggatgttgcagcgagccaagatcgtgccactgcactccagcctaggcaacaagagcgaaactccacctcaaagaaaaaaatatatatatttgattgtacatagtttttccctgtaatgtggcagctatctcggtgtatataagctcaatggccaagttctatttctctccaaataaaatactcagaccaaaaaagtattgctcttgaccaggtggggtggctcacgcctatagtcccagcactttaggaggtggaggcaggcagattgcttgagtccaggtgtttaagaccaccctgggcaacatggcaaaaccccatttctacaaaacatacagaaattaggtaggcgtgatggtgtgtgcctgtagtcccaactactcaggaggctgaggcaggagaatcacttgaacccaggaggcagagattgcagtgagcctagatctccccactacactctagcctgggtgacagagcaagactctgtctcaaaaaaaaaaaaaagaaaagaaagagctctccctctccctctctctccacggtctccctctgatgccgagccgaagctggactgtactgctgccatctcggctcactgcaagctccctgcctgattctcctgcctcagcctgccgagtgcctgcgattgcaggcgcgcgctgccatgcctgactggttttcgtatttttttggtggagacggggtttcgctgtgttggccgggctggtctccagctcctagccgcgagtgatctgccagcctcggcctcccgaggtgccgggattgcggacggagtctcgttcactgagtgctcaatggtgcccaggctggagtgcagtggcgtgatctcggctcactataacctccacctcctagccgcctgccttggcctcccaaagtgcccagagtgcagcctctgcccggccgccaccccgtctgggaggtgtacccagcagctcattgagaacgggccatgatgacgatggcggttttgtcgaatagaaaagggggaaatgtggggaaaagaaggagaaatcggattgttgctgtgtctgtgtagaaagaggtggacataggagactccattttgttctgtactgggagaaaatcttctgccttgggatcctgttgatctgtgaccttacccccaacccccgtgctctctgaaacatgtgctgtgtccactcagggtaaatggattaagggcggtgcaagatgtgctttgttaaacagatgcttgaaggcagcgtgctcgttaagagtcatcaccaatccctaatctcaagtacccagggacacaaacactgcggaaggccgcagggtcctctgcctaggaaaaccagagacctttgttcacttgtttatctgctgaccttccctccactattgtcctatgaccctgccaaatccccctctccgagaaacacccaagaatgatcaataaatactaaaaaaaaaaagaaagaaactgaacacctaaatagaacttactatgtgccaggctcagcccttatatcaacttgctcagttctcacaaatctgcgaggtagggaagctgttataaccccctgctccagaggaggagagcggggcccacaggggctgtgtcatttgcctagagtcacgcaggagtgagtagcagaggcagccgcaaacccagctccgagtcttcctctgttccctgcactagactcactcctctcacgtcagaagtggagaaaggggccagaggaaagctgacgccattggcaaaatcacgtccagcctgaaggggcccgtcggctctaactaatgcctcccattcacattgcccatcttcccatctttcaagaaaatccagaaatccagattgctaggtaaaacctggttttaaatggatccaattttgttttaaccctctgtagcccaaacaaagcacatcagcagactgcacttagcctggggccggccacgtgccaccctgctgttgcagctgtctctaaggactgcgctgtcctctgcctgtctaaagaccctggggaactctgggtctggtggccaaaggggagtcacctcagtgaacaacagctccttcagcccattgatatgaataattaatttctgcgtgctcactgccagcccacaaaggttaccaacaagctcggcattcaggaagccactctgtgccctctgagacaatgaggacaggcgtggggggatcctaggggtgttcagggagccccataatgaagcccagcatggtgagctgtgctcagagagccagcggatgccagcccagcctgctgcctaggtggggccacagagcatcatggaggctcattagagatgggacatgcggcggctttccctgctgtcagcaggagtgggctctggattcctcaagatgctttaaaataaaacggaaaggcgcaattatgcagccaaacagaaggcgaggcagctgcctacaaaacgaggctttctccgtaataggaccccaaccccagagcacagtgcggccgcctcaccgtcccccccaaggctgcagccgtgacgcgtctgtaattggatgcttcgctgttccagctcttggattattcaaattacaggattttcagtttcaattaaggttatgaccaggcaacaagatgagcaagataccatgtttcacctttatagtctatttcagcaagaagcatggccaaactagtaacagtggggataatcataaaattaaccaacacgtactgagtggttaccatgtgtcaggtctggttcaaggtatgttatatacatattgacttatttaaccttcacgccaacttacttgactattgatattatattatcatcgtcccctagcctacaaatataaacactgaggtgcaaaaaggttgaggaatttgctcaaggtcacatagcagttaagtggcagagccgtgaatcgaacccaggcaatgtggtcctagacagcgtgctcttatttattttgttttgtttttttgagacggagtcttgctctgtggcccaggctggagtgcagtggtgcaatctcagttcactgcaacctccacctcccaggttcaagcgattctcctgcctcagcctcctgagtagctgggattacaggcacgtgccaccatgctcagctaatttttgtatttttagcagagacggggtttcaccatgttggccaggctggtcttgaactcctgacctcaggtgatccgcccgcctcggcctcccaaagtgctggcattacaggaacgtgctaccacgcccgactaatttttgtatttttagtggagacggggtttcaccatgttggccaggctggcctcgaactcctgacttcaagtaatccgctacctcggacagcatgctcttgatcatcacaccagtagctgttttcatttatacggagctcaccacatgccggaccccatgctacattatttcatttaacctttgcaacaccaagtgaggtacaatgatccccattgtatagaaaagaaaataagcttatagacaggtgaattaacttggttaaggacacaaaataacaagtggctacagcctggatccaaacccagtttctctgattcaaagccaggctcttaaccttacttggtacgtagtcccagctcatttaacttactggcgtccataaaatttaggtctgtcgggaaaattatctagtccagtcaccttattttaaagtgaaaagctatagtctggagaggttaacagttagtggtgagctggagtagagaataactttggccccagaaagagctgtgttccaatcctggctctgtcctttgtgagctgtgtgactacagaccagtgactcaatgtctctagacttgttaatatagaatgagaagaatgatccttagtctcatgggaacatactgattaaagtatgtgtgtaacctacacttctgctcaacattcggcatgccaaaaccatctcattatagtcagctgtccccaaattacaaatggacgatttcaaactttggccgatgagtctgttctttatgatttgaaataatgctgtaagtgatgagtaggtcaccaagatgggcccccaagtccagtgaacagagaccttggaaaactgcagtgtacttctagacttctctgaattccttatacattccaaatgtgcaaaatccccaaggaaatcgcgtttttcagagagctgagcaatcagatctttaggccttccaccctcacaaatgaagttaatatactactaggtcaatgacatcaggaacacaataggtttgcatggtgcttaattctagtatccttttctatctgtttgtttgtttgtttgtttgtttgtaacagagtctcactctgttgtccaggctggagtgcagtggcgcgatctcggctcactgcaacctctgcctcctgggttcaggcaattatcctgcctcagcctctcgagtagctgggattacaggtgcctgccaccacgcctggataatttttgttttttttagtagagatggggtttcaccatgttgaccaggcaggtctcaaactcctgagctcaaatggtccgcctgccttggcctcccaaagtgctgggattacaggtgtgagccaccacgcccagccatggcctcacacacctggctcatgggtgacaaggaggatccttctcactatgttagtgatttaataaccttgcacctgcagcaatgaaccatcctgtaaggctgatcattttcctttgcataagccgtcaagactgatgatgtgcatctggatttatttcatttttgcggtccttattttttcttgccatggctggttgtatagcacgatgtgcctatgtgaccagcctcccattaaaatctcagactaatacaaaagttagccaggcacagtggccctcgcctgtaatcccagctactcaggaggctgaggcaggagaattgcttgaacccaggaggcggaggttacagtgagccgggattgccccactgcactccagcctgggcgacacagcgagactccatgccccaaaaaaataaaataaaataattgatttttaaaactgaggaaagaataaccccaccacttagcactaagagatcttgggcttgctggtggaccagtcagagcctcagtctccccatctgcccaataggaggctgttctaaaaattcaacgtgacagcgtaggtaaagcacttgacctagtgctttgcagagagtaggtactggagtatctttatactctagttccttcccagctctgtgtcaataaaaattttaaagtggccgggcgcggtggctcacgcctgtaatcacagcactttgggaggcggaggcgggcggatcacgaggtcaggagatcgacaccagcctggccaacatggtgaaatcccatctctactcaaaatacaaaaaattagccgggcgtggtggcgggcgcctgtggtcccagctactcgggaggctgagacaggagaatggtgtggatcccggaggcagagcttgcagtgaaccaagatcacaccactgcactccagcctgggcgacagagcgagactccgtctaaaaaaaaaaaaaatttaaagtaatcatttttctcagcagttgaaaaacgcgacgtgaggtccaggcagcctcccctcagacagtgttatctcaggccgactgtagcgagcgtcgaatgggaagacaggaacaggatcgctgcggaaagacttgcagatttactctgcagctacgcggtgcagaaataacaggacagactcacgtggtgtaaatacagctacacagagcggtggtgcaaagtcaggtggtcacggggatttctgcttatgattctagtatggtatacagagcccagtttccaaaacagccaaatctgccccaacacctggacgacgagtccctgtgactacaacacagccctgatgtttggaggtgacccactccccaccctccttgcaatgggttcctcaaaaccagaacaagctaaaaacgaaccttacacaaccagcattttccagcacagtaaaccaaggcagggaatgtatttttttcactgaacttctcattcgtgactattctaaaatcaaccaggaacttatcgagtgccggccatgagcccagccctgtgaaagatactgttgtgggagagaaaaggggtctaaacgacggtccccgctttccaggagtcagctaaccactcagtttgagagcagctcttcacagtaaacatgtaaaaggctactgccttgcacagggccgtggctccgttgttatttgtttactgactcaataaattaatagatggcataataataagacaattgtgccgtgtggggcccgctctaagaaccgcaagatgggttggagtcgttggaaaaggctgtgccagaggccactagctgcctacgcaatatcaattcttctatttttccttgtaacagagcccctattttacttgaggtggccatacacccagataaaatactgcatttcccagcctctcttatacctcgaggtgactaaggagataaaaacagaaactgtcaagagaggttcccaggaaagtgccttaaaaggcagacaaacagccaccactcactcttacgctcctcttcccattcttctaattcctgcctgaaatgtgaatgtgatggctggatctccagcagctatttcggaccaggaggtgagcttgaggacagagaagcagaaagactgaaaagcctccattcctgatgatcatggagtcaccatactctcggccggactgctggccgctggaattctgttacatgtgagataaataagcctctatcttgtttaagctactttttttcagttttgtcatatacagcaaacccctatcgaccaatcccaggttccacggaaaatcagcccttaaaggaggggttggtttgggggctggtttggggaagtcaaggcgggagggctcttcaaacgccagaaagggcacgggaaaagacgccggatggaatgagcaatggcagaaaggatctgcgtagaaaacagaatataagaagccagatggtggctttgcagacgccaagagagacagggcttgacggggaagcatcagggaccccaggggacctggaaaggttgtcttcctctgaagatgcaaaacacctctggagtagggacagcggtaagtaaaaaaggagagaaaggcaaacaaataagcttgggaaactttattacctggagagattcaaatataagcagtagcctggtttagccaactgaaaattcctggacttataacagcaacaataaagacaccatcgaggaagagtaacgataacagcaccatggaggatcccatctttttttctgagacggagtttcaccctgtcaccaagctggagtgcagagtcgtgatctcggctcactgcaacctctgcctcccgggttcaagcaattctcctgcctcagcctcccaagtagctgggattacaggtatgtgccactctgcccggataatttttgtatttttagtagagacggggtttcaccatgttggccaggctggtctcgaactcctgacctcaagtgatccacccacctcggcctcccaaagtgctgggattacaggcgtacgtgagccaccgcgcccggcctcaaatggcttcttaatatctcttcacaatagggatgggaaaaaattactctatcacagctgaggctgaaaattcaatccttcaaattaagttactcagacatccactgaacacaaggaattcttcctagagcaacaatctcattagtcactgatgggaagggcagaaaacccatcaggttacagatgaatcaggttcaggtaacatgactacttagtaggaaattcatttcccataaagattaaaaataaaaagtctcagggccaagtgtggtggctcatatctgtaatctcagcacttgtggaggccaaggagcgaggatcacttgagcccgggagttctagacgagcctggggaacatagtgagaccccgtctctacaaaaaattaaaaattagccggctcgtggcatgtgcctatagttccagctacatgggaggctgaggtgggaggatcgcttgagcctaggaggtggaggctgcagtgagctgtgttcatgccactgcactccagcttgggcaacagagtaagaccctgtcttaaaataaaataggccagggacagtggcttacacctgtaatcccagcactttgggagtccgagtcaggcagatcacctgaggtcacgagttcaagaccagcctggacaacatggcgaaaccccgtctctactaaaaatacaaaaagtaaccgggtgtggtggcgggcacctgtaatcccagctactcggggggctgaggctggagaattgcttgaactcaggaggcggaggttgcagtgagccgagatcttgccattacacaccagccggggtgacaagagccatactccatctcaaaaaaataaataatataaaaattagccgggcttggtggcgggcaccagtaatctcagctactcagaagactccatctcaaacaaacaaaaaatcagtaacaacacacacacacacacacacacagagacacgaataccctccatcgtcactctacgccaggtgttctgctacactctttaattattctcttgcatttaatcttcgtaactatcctgagagggaagtactaatatttgaggcggtacagcttggtgtgcgaaagcatggacctggaagccagactgcctggcttcaaatcctaagggctacttataagctgggtgaccatgggcaatgttattgaagttctccaggcctcgtgattctcatggaaaatggaaataataacagcacctgtatttgtccgtgttcacactgctgtaaagaactacccgagactgggtaatttataaaggaaagaggtttaattgactcacagttccccaaggctggggaggcctcaggaaacttacaatcaccgcggaaggcaaaggaaaagcaaccaccttcttcacaaggcggcaggagagcaagcaagcctgcgggggaaacttccaaacgctttaaaaccaccagatctcatgagaactcccctcgtgatcaggacaacagcccgggggaaaccgccccatgatccagtcgcctcccaccaggtccctccctcgacacgtggggatgacaattcgagatgagatttgggtggggatacagagccaaaccctatcagtgcctgtctcccgaaggtgctctgtggaatccatgaattaaagcatacgaagtgctcagaacaggagctggcaaaagtaagcccttagggttagcgacgtttattattcccatctgtcagagacggaggcttggaagggtcagtggctggccggtggtctcacacctggggagaggcaggcctgacttcacagcacgcaccacccaacacagctgatcctggctctgcccgtcccctcactcctcaccacaccaacacggcctggtctttgtctttcctggtaccaagcaaggctacaaggtactagaaggaagatactaagcgaattggcagactaacttatttacactctgatgttgctatcgtgcgcggacaaaaaagccgaaatgtgttttggcttaggaatctgcccctcatctaaaaggaaatggaggcccttttcacctctgcttctgggcctctgtaggtgaggcctcacgtgttctctctctgaaaccctgagactaaggcaaagcctggattgcccaataaaacctgaccttaaggacctctgaatgcagataatgagtgtgattgctggtggaggccaatccagcaaaaagagactcatgagccaagatgacctctgccttgagtcctgccctgctgcctgaaaggttctagaaagagtcagagccttgctgggagggggaaacacgtatcttattcattcatattttttagagacagggactcgctctgtcacccaggctggagtgcagtggcacaatcatagctcactgaagcctcgacctcctgggttcaagtgatcctcccacttcagcctcctgagtagctgggactataggttcacaccaccacaactgactgattctttttttcttagaaatggggtctcaccgggtgcggtggctcacgcctgtaatcccagcactttgggaggctgagatgggcggatcacaaagtcaggagatcgagatcatcctggctaacacggtgaaaccctgtctctactaaaaatacaaaaaattagacaggcgtggtggcgggcacctgtagtcccagctactcaggaggctgaggcaggagaatggtgtgaacccaggaggcagagcttgcagggagcccagatggcaccactgcactccagcctgggcaacaccgtgagactccatctcaaaaaaaaaaaaaaagaaaagaaaagaaagaaagaaatggggtctcactgtatcgcccaggctggtctcaaattcccagcctcaagcagtcctcccacctcagcctcccaaagtgctagaattacaggtgtgagccattgtaccagccacatgcaccacggaaaaccaaaccatctgcgatccagaatgactggggagtgggaagctctgaggaagcaactcagctgggcacagtggctcaggcctgtaatcctagcactttgggaggccgagacaggcggatcacctgaggtcaggagttcaagaccagcccggccaatatggtgaaaccccatctcatctaaaatacaaaaattagccaggcgtagtggcacactcttgtcatcccagctactcaggaggctgaggcaggagaatcacttgaacccaggaggcaggggttgcagtgacccgagatgacgccactgcactccagtctaggtgacagagcgggactctgtctcgacaaaaaagaaaaagaaagaagaagcaactcaaagaaaaatgacctgtagtagtggttaattaacacttatgggtgcttcctacgtgccaggacccgtccaaaacgctttagaaatatgacccatttatttctcatatcaacagcaggagagaagaggtgcttattagcctcagtttacagatgaggggactcaggctcagaaaagtcaaataacttctcccaatgtcacacaggcagtctagcttcagaaacatggtttaattccgtgttttcaaacctttttgttcatctcacagcaagaaatacattctacatcagctcccagtgtacacatacgcgtccgcatagaaccgaaacggagtccaaaaacagaataatactcgccgtgtccaatgcactcatcttgagagagaaaaacccctgcctgcctggagcttgcgtttgactggagggagacagtgaataagacccacatgcaaaattgcagcatccacggtggtaatttggggaatgctgtagagaaaaatgaagcaacaaaggacaagggtggccaaggaagaccgcccgggtgcttctgttgccaactgcactaatttcaatgagctgtttcccacagtgcgaaaacgccttcccttaatcgctccactctaatgcctccctgtatgcttgagggctctttctcctagattgtgtgtgcacacatgtatgtggcagtgtgcacatgtatgtacatgtgcaggtgtctgtgtatgcatgtatgtggcagtgtgccatgtatatacgtgtgcaggtgtgtatgtgtgtgcatgcatgtatgtggcactgtgccatgtgtatacgtgtaggtgtgcatgtgtgtgcatgcatgtatgtgacagtgtgccatgtacatacgtgtgcaggtgtgcaggtatgtgtgtgcatgcatttatgtggcactgtgcacatgtacatatgcaggtgtgtgtgcatgtatgtacatgtgaaggtgtgaatgtgtgcatgtatgtatgtgacagtatgccatgtgtttacatgtgcaggtgtgtgtgtgtgcatgcatgtatgtggcagtgtgtcacgtatatacatgtgctgctgtgcgtgtgtgtgcatgcatgtgacagtgtaccatgtgtatacgtgtgcaggtgtgtgtgtatatgtgtgcatgcatgtatgtggcagtgtaccatgtatatacatgtgctgctatgcatttatgtgtgcatgcatgtaaccaagtgcaagtccaccccccactcacttcctcacgaggaggctttggagacagaggcagaacccgaacatgtagctgtgcagtgtgccacaggagcttgccctgcagagggggctggaatggcacctgaaatctagcccaggcatcactagccaaagccgtgagtgccagacacgtgccccagctcacgtctgtagtcctgaggaaggtgactcttgttatcattggtccacccagaggggagcatcttttgcaattcccaggggcagcgccgatttctaacgtgcatcaaggtgccctatgtgctagagtgtcctaagggagacaggcgacgactcacagaaataaaaatcactccctgggaaaagcctagtgtactgggcaccccggggagggtgacagatgtgggtctggggggagacaggattgcagccagctctgaagcagctggggccagttgggtagcctccaccaagggcatttggaacttggcactagggtgaaatcttcaggctcttcccttaagttaaagagacatataaaaatgttaccagcatgggcggcaagagcattgcctgtgggaaacacagccaatctttgctaaggaataagtgtaattgatcaaaacagatgacttgatggaccttccaactgtgcttttagcaaagtggacagtttttcattcaaatgcaaactcatccagataaaatctaataatggagattttggaacaatcccagcatcaatgattttttttcctccttcactgagcaggaaggcatcttaaattcctggttgcagcttgacccaaccggacaccaccagtgtgctgctttccgcgtggctgaggagaccgtgacagttcacagacacagcaaagggctcccacgccacccccatccccacctgacctctcctccttagccccattcccactccctgacctagaaagagctcggtggacgctcaattccaggcaatcatttattcagccattatgcgttgagctttgactgctgcaaagcaccgtgcatactaccagaagggggttcaaagatgactaagatcaggccctgtcctcagaaaagagagcagatgcgaggggagagagatgacaggagacccggtgaaggtctcagctcaccccaacgagcacttaatctttctgagcttcggtttcctcttttatccagtgaagacgctggactagacatggtctctgggcaccaggccagccggaaaacgagatgggcctaagcctccccttgccctcttgctcccagactcctagaaagccaagaggccgggcgccgccttctaagaagaaaacgagtccgcagagggggctggtgagggccgtggcccttccctgaagtttgcacgtggccccaacacacagagcagcctggagaagaggagactaagttcagaaaatggagtggaaggttcggccttccgcggttaggaaagcggagctcagaaggatcggggatttccgggagatgggaagcccctggggtgtgtgcagagaggggtgacagacagaagggtgacagcacccggtggcgccaagggatctggcgggggccaggccggagggaggggctgggggatgtcagggccacggagcgcaaagcgcaaaggcccgggcgccggccctgccgccgccgccagttcattttcatagagtcgcccgagcttaacgtcgccttgcacgtgttttctaagctccacaggtggctttggggtacacgggcgcagctcaccctccttcccgcccgctccccggccccgagctcgaggttaaacagggccgcggagtcggccgggaaggggtcccggcagcccggggtggggggcgcgcggcggggtcgagcggggtctggggggggcgcccacctgcggagaagtcgtcctcgcggtcggagctgtgccggctgccgtcgctgtctctctccggcgagctgtggccgggcgagtcccgctcgggcacccgcaggaacctgcggcgccgccacgggggcaggtgctcgcgcccgggggtctcctccgcggcgaggggcgagcccgggcggcccttggcctcggcctcccgctgctccaggtcgcgggtcccccgctgcggccgccgccccccggggatcaggtgcatccagcggcgggggctgcgcgcccgctcgcgggtcccgaaccggcaaggggccaccagccagtggctgaggatgaacttctcgttgaaatccaccatctcgaagtcgtggtcgccgccgtcgcccccctcgtccgtgccgggagccgcctgggggtccccgaggggcgcgtcgtcctcccgggcccggaaccgcagctggggctgcaggagctgccggtggacggcgtcggcccagctccttcccccgccggcttctccggccgccccgggcccggcgggcaggtccccgcggggagactcggcctcggggtcggggcgcccggggtccccgcggggagactcggcctcggggtcggggcgcccgggctccccggagtctccgccgccgccccgggccagcgcggcctgcgggagcgaggctttgagctgctcctccgccagcacctgttgcagccgctccaggttgagtctgcggcgctccagctcccgctccgcgtcccgcaccgactccagcctcgggaccggcgcctccgccccggggaactcggcccgccagcgccgctcgaacgcgcgggggtcccacatgccccgagctccgtccgcgccgacccttccccgcggcccccgaagagaccagagggaaagtcaagtgtccccttccgccctcgcgcctcctccccgtcttcttcctcttttcttcccctcctgggtttcgcctccctgacgtcggcggctcctcgcggcgggggcgggcgccccggggatgagaacccgccccgggcatcccacagccagctcgggccgcggagccgccgggggagggcgggagctgcggggcctggactcgagccttcgccgcccgccccgatcccggccccggaccccgcccgccccgctcccctgtcggccccgctccctgcacccgagcgcggggccccggacaccctcctgccgggccgggggaagacgtgggggctgagggcggcgtggctggtgccactgcggacccgcggggtcgccctgcgccgggattgatggattgattgattgatgattgattgattgattgactgattgattgattttccttttttgaggccaggtctcgctctgtcgcccaggctggggcacagtggcgcgatcgtgccttaaactcacgtgacgaagatcacggagcagtttagtccaaatccgggggtaacgcttcggggttctgtcggcccctgtaagcttctctcctcttctcactgaagctcttccgggaaaaacacccaaggatgactgagccaagcggctctagctggaggcgcccgggacctcaaagctggactccccggggactgagtccaaccgtggctgcaggggccgcggcctggcggagggtccgcgtgggtgtctacgaggatcccccccgttccatctcctctttgcggcctcagacacttcccctggggaggacgagaaatgggagctgggccgggcgcggtggcccacgcctgtaatcccagcactttgggaggccgaggtgggcgggtcacctgaggtccggagttcgagaccagcctgaccaacatggagaaaccgcgtctgtactaaaaatacaaaattagccgggcgtggtggcacatggctgtaatcccagctactcgggaggctgaggcaggagaatcgcttgaacccgggaggcggaggttgcggtgagccgagattgcgccattgcactccagcctagacaacaagagcgaaactccatctcaaaaaaaaagaaagaaagaaacgggagctggagagggggcctggagacgggggtcccacgtggccctgccctccgcacctggctgagcaaggctttccagttcttttccagggttgtggatgaggctccactgcctgcgaagagaggccctgataaaccatctcgtgctttcttaaagaggggacaccttatcaatgattcacgtttccttcattttaagcatgaagaaattgatctaagaggccgggcgcggtggctcacgcctgtaatcccagcactttgggaggccgaggtgggcggatcacctgaggtcaggagttcgagaccagcctggccaacatggggaaaccgtgtctctacaaaaatacaaaaattagccgggcgtggtggcagacgcctgtaatcccagctactcgggaggctgaggcaacagaattgcttgaacctgggaggcggaggttgcagcgagccaagatcacaccactgcactccagcctgggcgacaagagtgagactccatctcaaaaaataaaaataaaaaaaagaaagaaaacaaagaaattgatctaagaggctgacttggcagctggaaattcttcctccccacagcaccttttggggactagagctaaactcagccaccttctccatagcccctgccacccacccggctctcacctgaaccatgggcacaggccgtcctggtcccacttttccagccccttaattcattcctcaaggctacaaggaagcaaggaagatgtttcttaaccacaaatgtgccatgtgtttgcgccctttcttggctcccgtcgcgtacagggtggagtccagactccttggcctgacgcaggaagtcctcccacatctggtctctgcccacgtcgctgccttcttcctataatttagccttgccagctcaaagctggccccaaagacctcacacccttttccttttccttggaacttctcatctctccctacacgcttgcaaaagtccccgctgcctggggacctccccctctgatgaaccttttcagcccctcctcgcccttgtttgtatcagcattggatctcatgcctgccttttatctttgtttgcccttgttccacctttttttgtttcttttcctgtagagaggcaacggcttctccatctcatctcactccctgaaacggcagggggccatgagcaaatggaacaaatttcaaatccaccatctcggccagttgcggtggctcacacctgtaatcccagcactttgggaggccgaggcaggtggatgacctaagctcaggatttcaagaccagcctggccaacatgatgaaatcccgtctctactaaaaacacaaaaattaatcgggtgtggtggcgggtgcctgtaatctcagctactcccaagggaggctgaggcaggagaatggcttgaacccaagaggtggaggctgcagtgagcaaagatcacgccattgcgctccagcctgggtgacagagcgagactctgtctcaaaaaaaaaaaaaaaatcccccaaaaagacaaaaaaatccactatctcaaagtcgtgctcactgctgttgcccccatcatctcatgttgcccaggctcctcttgaactcctgggctcaagcagtccaccctctctgcctccccaagtgctgggattaccagcatgagccactggggattccacctgtagggtagcggtgcaattactgctcactgcagcctggaccccctgggcggaagccatcctccctcctcagcctgcggagtagctgggactacaggcatgtggcatcatgcctggctaatttttgtatttttcgcagagatgggggtctcactgttgcccaggatgctctggaactcctgggctcaagcaatcggcctgccctggcctcccactgtgctgggattacgggcgtgaggcactgcattggactccactttattgtagttaccagtgagaccttctgtttcccctactctaagaacccctcaagtgcagagattgtgtcttttttcatttttgtattccgacaccttctcgcagagtgtggtatagagatgactgataattgttgaaggaaagaaatgaacgaacgaacaaacagacagatgcatgaaccccctccttgcctcctgctgggctctcctgtcctgaatcactccggactggggcacatttgcttcccacacgtcaactccaagaaagaatttcctttcttgccaaagtctgtgtttactcattttactaatatccctcttccttctttgtttattcttttcctttttttttttttttttgagacagaatctcactctgtcgtccaggctggagtgcagtgacgcgatctcggctcactgcaagctccgcctcccaggttcacgccattctcctgtctcagcctcccaagtagctgggactacaggcgcccaccaccacgcccggctaaattttttgtatgtttagtagagacggggtttcaccgtgttagccaggatggtctcgatctcctgacctcgtgatccgcccgcctcggcctcccaaagtgctgggatgacaggcgtgacccaccgcgcccggcctctttctttctttctaactcggtgtgccactggcatgaatcatcccagtgtttgtcttcacgccagactgctatggagaaatggatatgttttttgttattattattctatttttttttttttgagatagagtctcactctgtcacccaggctggagtgcaatccccattcactgcaacctccgcctcccaggttcaagtgactctcctgcctcagcctcccgagtggctaggattgcaggcacgtgacaccacacccagctaatttttatatttttagtagagacggggtttcaacatactggccaggctggtctggaatccctgacctcaggtgatctgcccgcctcggcctcccagagtgctgggattacaggcgtgagccaccgtgctccacccacgtgttttaaatacactactttggccgggtgcggtggctcatgcctgtaatcccagcactttggaaggccgaggcgggcagatcacctgaggtcagggattccagaccagcctggccagtatgttgaaaccccgtctctactaaaaataccaaaaattagccaggcgtagtggcagacgcctgtaatcccagctactcaggaggttgagacaggagaactgcttgaacccaggaggcggaggttgcagtgagccgagattgtgccactgcactccggcctgggcaacaagagcgaaactccgtctcaaaaataaataaataaataataaaaataaaatgcactaacttcctattccccagtttgagtgatttctcgatctttcacctagctcctcaacctgctttctctcccaccttcactgcacatcccaggggccatcacaatctcctttgtccactgagaaggactgagaagcttccaatgcctatcgccagcccacgccagggagagtccatcaaagggagtccacgacatcttggcctctgtatacagatttcagaatgggagaggaagagcagtccagaagtgagggatgaccccaggcaacagcatattggttggaaactgtttcaatatgtatatttaaatgcaccaagaaaaagaaaactacaggttactaatacgcatccatttctgaaagtgcaagttccctgggaggatagtttcaaatctgtcctttaattaaagccgtggtatgattctcttttggcccaaggaaattgttaccaataccactaattttttccacaaggaccagtagagctggaaatggcagcacacatcatcttctataaacagatcccaggagcagcctgcattgtccccagctggtggatagctcaagctttatgacttggctctgggtcctcatggggacaggggtaggctgctgacatttattgagtccacacctctagctgccatacattttttatctcttctaattcctcacagcaaccctgtgaagaaggtattattgtcgccgcttcagacagacagaaatggaaggtcaaagaggttagaagccacacagctagtctgctgaattttttttttttttttttttttgttgttgttgttgagagacagggtaggcggggcacagtggctcatgcctgtaatcccagcactttgggaggccgaggcaagtggatcacctgaggtcacaagttcgagaccagcctggccaacatggtgaaaccccgtctctactaaaaatacaaaaattagccgggtgtggtggcgggtgcctgtaatcccagctacttgggtaaggtgggaggctgaggtaggaggagcacttgaacccgggaggcggaggttgcagtgagcagagatcgtgccaccatactccagcctgggcgacagagtgagactccatcttgaaaaaaaaaagaaaagaaaaagagacagagtctcactctgtcacccaggctggagtgcagtgatgctatcatagctcactgcagcctcagcctccggtactcaagccatccttccacctcagcctcccaagtgcacgccaccacacccagcttttttttttttttttttttttttttgtagagacagggtctccttatgttccccagcctggtccagaaatcctgggctcaagcgatcttcctgcctcagcctcccaaagtgttgggattacaggtgtgagccaccacgttcagcctgctagattctgtagtcctgcagctttgtaagaacttggtccaggtgcatctgtcactggcatttctttaatcaataaatatttgttgagcacccactaggtcccagggcctggcaaattaagtttaaacttcgtttttggtttatttttttgagacaaggtcttgctctgtctcccaggctggagtgcagtggccgcaatctcagctcactgtaacctccgcctcccaggttcaggcgattctcctgcctcagcctcctgagtggctgggattacaggcatgcaccaccacggccagctaatttttgtatttttagtagagacagggtttcaccgtgttggtcaggctggtctcgaactcctgaccttgtgatccacccacctcggcctcccaaagtgctgggattacaggtgtgagccaccgcaccccaccaggcacccagttttctagaatttttgtcactacagtcttgccttttctagaatttttttttttttttttttttttttttagacaggctctcactccatctcccaggccggagtgctgtggtgcgaccacacgtcattgcagcctcgacctcccaggctcaagcagtcctccctcctcagcctcccaagtagctgggagcacaagccaccacatgtggtgatttttatttattttttttttgtagagatgaggtctcactatgttgcctaggctggtctcaaactcctgggctcaagcccgtcctcccacctcggcctcccaaagtgctgggattacaggtgtgagccaccgcatccggccccttcctagaatcttgtatgaaagaatgtagtcttggtgttggactgttgaaacaacacagtgtttctgagttcaacctgcactgttgtttacatctccttccttcccttcccataccccagggtcggaaataggcattttaacacactaggtggaaacaggcattcaaccttcattctaacgctgtgacaaaagtgttattatcattattttgcagataaacaagtgtggtttgatgagattaagacagtcattcagggccaggcttagtgtctgacgcctgtaatcccagcactttgggaggccgagggggcagatcacctgagatcagcagtgagaccagcctggccaacatgctgaaaccccatcctcactaaaaacaaaaaaaaaatacaaaacacaaaactcaaaaatcagctgggcggggtggcgggtgcctgtaatcccatctactcaggaggctgaggcaggagaattgattgaactcgggaggccgttgcagtgaaccaagatcacaccattgcactgcagcctgggcaacaagagcaaaactccgtctcaacaaacataaaagatagtcattcaagtttgtgtaattcattcctttttattgtggaagaatattccattgtatgaatatacccctatttgtttattctccagttgatagacattggagttgtctctgtgtggacaagtgttttcatttctattccccacaaaaaatacagaaatgggattgctgggtcataaggaaactgtatgtttaacttttcttttttctttttttttttttttttaattttgaaacgaagtctcgctgtttcgcccaggctggactgcagtggcgctatcttggctcattctgcctcccgggttcacgccattctcccgcctcagtctcccgagtagctgggactacaggcgcccaccaccgtgaccggctaattttttgtatttttttagtagagacagggtttcactgtgttagccaggacggtctcgacctcctgacctcatgatccgcctgccttggcctcccaaagtgctgagattacaggtgtgagccaccgcgcccggccaaaactgtatgtttaacttttaaagatattaccatacaatgttttccaaagtgtctgtactattttcctttttttttttttttaattttttgtatttttaatagagacggggtttcgccatgttggccaggctggtctggaacccctgacctcaggtgattcgcctgcctcggcctcccaaagtgttgggattacaggcgtaagccaccacgcccagcctgttttccattattaacagcaatgtgtgtgcatctcattgttctatgtgcatgtcaacacttagtgttgtaagttttttttgctttagccactttagtgggtatataatactatcttgttgtggtttaatttgattattaatgatgtataacatcttttcatgtacttattgaccatttgcatattttcttttatgaagtgtttgtttacatcttttgtccattttttattggatatccttttagagttgacttgtaatagtcctttttttatttttatattttttgagacaaggtcttgaggtctgttgcccaggctggtctggaactcctgggctcaagtaatcttcccacctcagcctcccaagtagctgggactacatgcctggctatggttttttttcttttttgtagagacaggttctccctatgtttcccaggctggacttgaactgctgggcttaagtgatcctccctccttggcctcccaaagtgttgggattacagacatgagccagtatgctctagctcttttttttttttttttgagacaaggtcttgctctgtcacctaggctggagtgcagtggtaccatctcagcttgctgcaacatccacctctgagactcaagcgatccttccacctcggcctcttgagtagctaggattacaggtacgtaccaccacgctcagctaatttctgtattttttgtagagaccaggtttcaccatgttgttaggctggtctcaaactgctagactcaagtgatccacctgcctcagcctcccaaagtgctaggattacaggcctaagccattgcacctgtcctgtttagttcttttctttttttttttttagatggagtctcgctctgttgcccaggctggagtaaagtggcacaatctcggctcactgcaagctccgcctcccgggttcacgccattctcctgcctcagcctccctagtagctgggactacaggcgcccgtcaccatgcctggctaatttttttgtattttttcagtagagacggggtttcaccatgttaacaaggttggtctcgatctcctgaccttgtgagccacccacttcagcctcccaaagtgctgggattacaggcgtgagccaccacgcccagccatggcctgtctagttctttatattatttattcatgctctttgtcagatatataaatatagatagatagatgatagatagatgatagatagatagatagatagatagatagatagatagacagacagagagatagagagatagattttttttttttgagacagagtctacctctgtcgcccaggctggagtgcagtggcgccatcctggctcaccgcaacctctgcctcccgggttcaagcgattctcctgcctcactcagcctcctgagtagctgggattacaggtgtgtgctaccacacccggctaatttttgtatttttggtagagatggggtttcaccctgttggccaggctggtctggaactcctgacctcatgtgatccgtccacctcgacctcccaaagtgctgggattacaggtgtgagccactgtgcctggccgtgtccaagtttttgtatggacatgttttccattttctctgtttctgcttaggagcgaaattgctggctcatatggtcactctgaatttcgcttatcagagaacagtccgaccgtttccaaagcatctacgtcattttaccttcccggcgtatacgggctccaactgctccacattctttcccacactagtgtgcattttttgtatcatagccaccctagtgcgtgtgatgtggtatctcattgtggtttctctggttgttgtttccttcggggtttttttttctttttgagatggagtgttgctctgtcacccaggctggagtgcagtgcctcaatctcagctcactgcaaactccacctcctgggttcaagcgattctcctgcctcagcctcctgagtagctggcattacaggtgactgccaccacgcctggctaacttttgtatttttagtggagacagggtttcaccatgttggtcaggctggtctcaaactcctgacctcgtgatccgcctgccctcagcctcccaaagtgctggaatgacaggcgtgagccaccgcgcccggccttgttttgtttttgagatagggtcttgctctgtcgcccaggctggtgtgcagtggcacagttgcggctcactgctgcttcaagcaccagtactcaagtgatcctcccacctcagcctcctgagtagctaggaccacaggtgcctgccaccacactcagctaattatttttttaactgtcttgtagagacgagatctcactatgctgccggggctggtctcaaagtctgggctcaatctgtgttcccacctcagcctcccaaagtgctgggattaccagtgtgagccaccgcacccagtcctctcagccctctcaacctcccaaagtgctgggattaccggcgtgagccactgcacccagcctcgtcatggttttgatttatttgcctttgcctaataattaatgatgaacacatatgcatggtcttgaaaccacctttccaaaatgatgactgagacagtgttagatctaacttgaccgactccggcttgctcctaacctccaagctgcccttgttcattcctgggcataggctgaactaactttaggagaaacttagtttatagtttatagtttaaacaaagacggtaacagccctttcccaaagcagacctccttcttccccggggactcgtctgcctttgcaggactaactttagccccaagattagaaattatggtttaggagtcatgcagctggaggccagaagattctgaccctccttaaactgctcctaagatcagcgcttgagatattttggaaaccctgcacttcatgagtcagctgacaccacccacatcaataaactggctcatctgatcttgcggaccccacccaggaacgattgagctcaagaagacagctttgacgccctgtgatttcacctctgaccaatcagcactcctggctcactggcttcccccacccaccaagttatccttaaaaactctgttcccattggccgggcgcggtggctcacgcctgtgatcccagcactttgggaggctgaggcagacggatcacgaggtcaggagatcgagaccatcctggctaacacagtaaaatctgctctctactaaaaatacaaaaaaattagccagacatggtggtggacgcctgtagtcccagctattcgggaggctgaggcaggagaatcgcttgaaccagggtggcagagcttgcagtgagacgagatagtgccactgcactccagcctgggcaacagagcgagagtccgtctcaaaaaaaaacaaaaacaaaaacaaaaaaaactctactccccagtgctcagactgactagagtaataatagaactccagtcacccgcacagccggctctgcgtgaattactctttctctattgcgatcccctgtcttgatgaagcctccctgtctgggcggtgggcagggtgaaccccttgggcagttacattcccactgggcatctatatattttctttagaaaactgtctattcaaattcctaacccaatttttagttgcactgtttgcctttctattgttgagttgtaagagttttcatatattctagctattggacctttttttttttttttgagacagagtcttgctctgttggccaggctggagtgcagtggcacaatctcggctcactgcagcctctgtctcctgggttcaagcaattctcctgcctcagcctcccaagtagctgggactacaggtgtgcgccaccacactcggctaatttttgtatttttagtagggatggagtttcaccatgtttgtcaggctggtctcgaacccctgacctcgtgatctgcccaccttggcctcccaaagtgctgggattacaggcgtgagctactgtgcctggtttttgttgttgttctttgagatggagtctcgctctgtcgcccaggctggagtgcaatggctcagtcttggctcactgaaacctccgcctcctgggttcaagtgattctcttgcctcagcctcctgagtagctgggattacaggcatgtgccaccacacctggctaattttttgtatttttagtagagacagagtttcaccattttggccaggctggtcttgaactcctgacctcgtgatccacctgcctcagcctcccaaagtgctgggattacaggcgtgagccgctgcgcctggccctcctacctttttttctgttttatttatgtctttcacagcattgctgtttttgaggattccaggccagtcgtcatggagagtgtcctgcgtaatctggacccatctgatgtttcccagtaatttgatccaggttgagcgttttgccaggtgctggtgtgtgcttcacgtggcattgtatcatgacgttttctaattactgcagaatggggtctgtttcctcatcacgctgccagggctctgccaattccacgcctctctttctagaaacaagcaagcaaaggtctcatgtgcaacttctgttttccacattttctaaattacaaaagcaataagggcttgtgaaagaaaactggaagaatccagaattatataagataaaaaatgaacatctcggccggggtgacagagcgagactccatctcaaaaaaaaaaaaaaaaaatgaacatctctctcgattctggcacctctccctgggggaactaggtccactttggtagttctccaactggaacttaaagagagagacagagagagagagagagagactgacagagagacttgctttggctaattttttattttttgtagagacaaggtcttgctatgttgcccaggctggtgtcgaaccccttgcttcaagtgatcctcctgcttcagcatcccaaagtgctgggattataagtgtgagccaccatgcccagcccccaatttatttattttgagacagtttcaatctgtcgcccaggctggagtacagtggctcactcactgctcactgcagcctcaacctcctgggttcaagggaccctcccacctcagcctccctagtagctgggacttcagatgtgcaacaccgagcctggctaattttttttgctagtttttgttttttggtttttttttggtagtttggttttctggtttgtttcaccatgttgcccaggctggtctctaactcctgggctcaaatgatccaccctacttggcctcccaaagtgctgggattacaggtatgagccattgcacctggcttattttcttcttttttttttttttttttttttgagacagtctcgccctgtcgcccaggctggagtgcagtggcgccatctcggctcactgcaagcaccgcctcccgcgttcacgccattctcctgcctcagcctcccgagtagctgggactacaggcacctgccaccgcgcccggctaattttttgtattttgtttagtagagacggggtttcaccgagttagccaggatggtctccatctcctgaccttgtgatccacccgcctcggcctcccaaagtgctgggattacagatgtgagccaccgcgcccggcctcttcttttttttttttgagacggagtcttgctctgttgcccaggccgaagtgcagtggcgcagtcttggccaacatggtgaaaccccatctctactaaaactataaaaattagcagggcccagtggcaggaacctgtaatcccagctactcaggaggctgagacaagagaatcgcttgaaccctggaggcagaggttgcaccaccgtgcccggctaattttttgaatttttagtacagacagggtttcaccttgttagccaggatggtctcgttctattttaaaccaatcactgctgccaggggcactgccgtaagccaactagcatctatccctggagctgagggcgcaggttaattgcacctaaaccacatggctgagaacctgggaagcgttaatttccccatgagaaatcagagccttgttggcaagaaaaaaggagcaggcaaacaaaaatgtctgttctgggttgacgtaaggaccctcacagaactctctgcgggcgtggtggctcatgcctataatcccagcgctatggcaggccgaggcaggaggattgcttgagcccaggagttccagaccagcacctgtagtgccagctcctcagaaggctaaggcaggaggatcatttgagcccaggagtttgaggctttttttttttttttagacggagtttcgctcttgttgcccaggctggagtgcaacggtgcgatctcagctcactgcaacctccgcctcccaggttcaagcaattctcctgcctcagtctcctaagtagctgggcatgtgccaccatgcccagctaaatactaactgcccttgaggcatggtgtcaatgtacccccccaccaacaatgtctgagagtgcttgttttcttatgccctggcccatgcagtgtgatatcaaattttggaattttactagtataacacatgaaaatgatatatcaatatagttttaatttgcatttatcttattatgactggcttaagaatgttttcataataagagccatttctcttttttctgtggaaatcttttttttttttttttttctcccaagatgcagtctcgctctgtcgcccaggctggagtgcaatggcaccatctcggctcactgcaacctctgtctcccaggttcaagcgattctactgcctcagtctcccgagtagctgtgattacagacgcccaccaccacacctggctaatttttgtatttttagtagagaccgggttttgccatgttggccaggctggtctcaaactcctgacctcaagtgatccacccgcctcggcctcccaaagtgctgggatgaaagggtaagccaccgcacccggcccatctatttaagtcttttgcccattttcctcttgggctgttaatctttttcttatccatttgtaggaattctttaaataccagagaacttagctctttgcctgtgatatgagttgaaaatatttttccaaacttgtcgtttatcatttgactttgcttattgcattagtccattttgtgctgctgtaacaatacctgagactgggacatgtataactaacagaaatgcacagttctggaaagcaaaaagcagcgacgggcctagtgccaggtgagggcctgatctctgcttccaagacagagccttgtaagttcatcatccagggagagggagcgtgttactcacacggcagagggcggagaggcaagcagcaacagggccccagacgtacccttttatacaatgatggcattaatccactacagatgagggcaaagcccttttataagatatagcgttaagcctacacacaagggtgaagccctcctggcctaatcacctcttaaaagtcctacctccgaacactgttgaacactgttacaggccgggtgcggtggctcacacctgtaatcccagcactttgggaggccgaggtgggcggatcacctgacgccaggagttcaagactagcctgaccaatacagtgaaaccccatctctactaaaaatacaaaaattagccagacgtggtggcgcacgcctgtcatcccagctactcaggaggctgaggcaggagaatcacttgaacccaggaggtggaggttgcagtgagctgagatcgtgctatcggacttcagcctgggcaacagagtgagactcctcaaaaaaaaaaaaaaaactgttacaatggcaattaaatttcaacatgagttgtggagggaataaacaatcaaaccatggaactttacaatttccctgcagacttttttatttagccaaatttactgatttctttttggtggatttttgatattgtgatatggtaagaaaggccttactctgcactcataaaatcatgtttttatattttctttttgtttttttgcattttaatctttgatccaattggaatttctgctcatatgcagtaagtatggctctaactttgttttttgatacagctgtttcaatactacatattaagaaagtaaactaggcagggtgtggtggctcacacctgtaagcccagcattctgggaggccaagacaggaggacttcctgagcccaagaattcaagaccagcctgggcaacccagcgacatctcagtttctaataaaatgaaaaatgatctgggcatggtgctgcacgcctgtagtcccagctactcaggaggttgaagtgggaggatcgcttgggcctaggatgtcgaagctgcagtgagctgtgatcatgccactgcactccagcctgggtgacagcgtaaaaccctatctcaaaaaaaaaaaaaaaaaaaaaagccaggcacagtggctcacatttgtaatcccagccctttgggaggccgaggcgggtggatcacctgaggtcaggagctcgagaccagcctggacaacatggtgaaactccgtctctattaaaaatacaaaaatcagccaagcatggtggctcacgcctgtaatcccagctacttgggaggctgaggcaggagaatctcttgaactctggaggcggaggctgtggtgagccgagatcatttctccactgccctctagcctgggcgatggagtgagactgtctcaaaaaaaaaggacatcttagaccttcatcaaatatttctggagaaagtgattccgagtgctttgctcatcagtcttcatttcttttttttttttttttttacctttttttccccctaagattttttattttattttattttattttttgtattttttttttcaatttcttttttttttttttaattgatcattcttgggtgtttctcgcagagggggatttggcagggtcataggacactagtggagggaaggtcagcagataaacatgtgaacaaaggtctctggttttcctaggcagaggaccctgaggccttccgcagtgtttgtgtccctgggtacttgagattagggagtggtgatgactcttaacgagcatgctgccttcaagcatctgtttaacaaagcacatcttgcaccgcccttaatccatttaaccctgagtggacacagcacatgtttcagagagcacagggttgggggtaaggtcacagatcaacaggatcccaaggcagaagaagttttcttagtacagaacaaaatgaaaagtctcccgtgtctacctctttctacacagacacggcaaccatccgatttctcaatcttttccccacctttcccgcctttctattccacaaaactgccactgtcatcatggcccgttctcaatgagccgctgggcacacctcccagacggggtggtggccgggcagaggggctcctcacttcccagtaggggcggccgggcagaggcgcccctcacttcccggatgggggggctggccgggcgggggggctgaccccccacctccctcccggatggggcggctggccgggcagaggggctcctcacttcccagtaggggcggccaggcagaggcgcccctcacctcccggatggggtggctgccgggcggagacgctcctcacatcccagacggggtggcggggcagaggcgcccccacatctcagacaatgggtggccgggcagagacgctcctcacttcctagatgggatggcggccgggcagagacgttcctcactttccagactgggcagccaggcagaggggctcctcacatcccagatgatgggcggccaggcagagatgctcctcacatcccagacggggtggcggccgggcagaggctgcaatctcggcactttgggaggccaaggcaggcggctgggaggtggaggttgtagcgggccgagatcacgctactgcactccagcctgggcaccattgagcactgagtgaacgagactccgtccgcaatcccggcacctcgggaagccgaggctggcggatcattcgcggctaggagctggagaccagccccgccaacacagcgaaaccccgtctccaccaaaaaaatacgaaaaccagtcaggcgtggcggcgcgcgcctgcaatcgcaggcactcggcaggctgaggcaggagaatcaggcagggaggttgcagtgagcccagacggcagcagtacagtccagcttcggttcggcatcagagggagaccgtggaaagagagggagagggagaccgtggggagagggagagggagaaagagggagagggagagggagagggctattttttgtatttttagtagagacggggtttcaccatgttagccaggatggtctcgatctcccgacctcgtgatccatccgcctccacctcccaaagtgctgggattacaggcgtgagccaccgcgcccagcccatcaatcttcatttctaacatctccagtaactgatccttatcctgttaactctttgaggctttggatagtgtttttgttattctgtccagtatttaaatttctcttcaaggaaagaattgtcctaaattatctaatccgctagtaccagaagaggaatttctgggttattgtggtaaagtttcatgtgatgaaccatccttgaattctctcagaataaacaccacatggtcataacatgttaattttattatttttttgtgtgtgtgagacggagtttcactcttgttgcccaggctggagtgcaatggtgcaatctcagctcactacagcctccacctcctgggttcaagtgattctcctgcttcagcctcccaagtagctgggattacaggcttacgctaattttttgtatttttagtagagatggagtttcatcatgttggccaggctggtccctaactcctgacctcagatgatccacccgcctcggcctcccaaagtgctgggattacaggtgtgagccaccacgcccagccatgatatgttaacttaaatatgcaggccaggggtggcggcacactcccctagtcccagctacttgggaggctgaggtgagaggatcgcttgagcctaggaggcaaaggttgcagtgagccaagatcaccttgctgtcctccaacctgggtgacagagtgagacctcatctaaaaaaaaaaaaaattaggctagccgggcatggtggctcacacctgtaatcccggctttgggaggccaaggcgggcagatcacaagatcaggagttcaagaccagcctggccaatatggtaaaaccccgtctctactaataatacaaaaattagccaagtgtggtggcacagacttgtagtctcaactactcaggaggctgaggcaggagaatcacttgaacctaggaggcagaggttgcggtgagccaagatctcgccactgcactccagcctgggcgacacagcgagagcgagactccatctcaaaaaaaaattagaccgggcatggtgactcacacctgtaatcccagcactttgagaggctgaggtgggcagatcacctgaagtcaggagttcaagaccagcctggccaacatggtgaaaccccatctctactaaaaatacaaacattaacagggtatggtggcgggcgcctgtaatcccagctacatgggaggctgaggcagaagaatcacttgaacccaggaggtggaggttgcagtgagccgagatcgtgccacggcactccagcctggacaacagagcgagactcagtctcaaaaaaataataaaataaaataataaataaataaatatgctatattccgtttactaatattgaatgtgtactttttgcattaatgttaatgcctgagatatttctacatttatatttttaggggaatctttcctgggtttggtaccagtcttgtgctcatccttttaaaagattttggaagtttttcttcttttcctatagtttggaacaatttaaatagccctggtattatcttctcttgaaaggtttggtagaattcccatctttttttgtgtgtgtgtttgagactgtattttgcattgtcgcccacactggagtacagtggcgtgatctccgctcgctgcaagctccgcctcctggatttaagcgattctcctgcctcagcctcccaagtggctgggactacaggtgcccgccaccacgcctggctaatttttgtatttttagtagagacggggttttaccgtattagccaggatggtctcgatctcctgacttcgtgatctacctgcctcggcctcccaaagtgctgggattacaggcgtgagcccccgcgcccggcccctagtgcagtggttttaattgtgttcatggggacccttgctggggactgtggagggaagatcatggggacccttgctggggactgtggagggaagatcatggggacccttgctgggggctgtggagggaagatcatggggacccttgctgggggctgtggagggaagatcatggggacccttgctgggggctgtggagggaagatcatggggacccttgctgggggctgtggagggaagatcatggggacccttgctgggggctgtggagggaagatcatggggacccttgctgggggctgtggagggaagatcatggggacccttgctgggtgctgtggagggaagatcatggggacccttgctgggggctgtggaggggaagaaaagtcacgtgaacgacagacggaattccattccctccagtgcacacagctgccgctgcagcaattatgtgcttaaaaaataacaaaacatgtagttggagtagattttcaataacatgaaattacaaaaattaaatttttggtttttgttgttactggagtaaaaagctttaatgccttttcttgtatttatttcttgctctagcctttttcagagaccaaaatttgcgtgtggaatcacttcccaaacatgtattctgccatcagagatccagagcaatgaatctaagttgcttcaggctatcatgataaccctttctctcatccccaaagctcatcgataaaatttgacatttgctcatcagaaaacaattcccgattctgcgcttcttatctgtgctgttctcccccacaggcagagggttgtacatctttgattactcctagagtggagtaaatgggattgttaagcataaggatgaaggcaagatggggaggcggagcatcagatccacactcaggttttgcaaaatcaaaacaaacaaacaattccccaataacaacagaagcctctaactctttttttttttttttttttaagacagggtctcgctctgtctcccaggctgggtgcagtggcgccatctcggctcactgcaagctccgccttccaggttcaccccattctcctgcctccgcctcccgagtagctgggactacaggcgtccgccaccacgccgggctaattttttgtatatttagtagacacagagtttcactgtgttagccaggatggtctcgatctcctgacctcgtgatccagctgtctcggcctcccaaagtgctgggattacaggtgtgagtcaccacgcctggccagaagcccctaactcttttagaacaacgtgctatttattaataggctattttctcatctccccttctgggaaagctcactcagaaaaacccttaacacacaaccagaaagcctctggttacaagtgacctttgcaaagtgtcctgttttcaaaggaaggggcttcaaaataagagaagatggaagacatctgaattggaactcacccccgcaccccaaccctggggaagagggtggggatcaagatcactgccggccaggcaccatggctcacgcctgtaatcccagcactttgggaggccgagacaggtggatcacgaggtcaagagttcgagaccagcctggccaacatgttgaaaccccatctctactagaaatacaaaaattagccgggagtgggtgcacgctgtagtcccagctactcgggaggctgaggcacgagaatcacttgaacccgggaggcggaggttgcagtgagctgagatctcgctgttgcactccagcctgggcgacagagcaagactcaaaaaaaaaaaagagagagagagaatattagcctctccttgttcctccaaaaggcagaaactaaacccccagaggcaaatctaccaaggctgacccactccccaccacactgccctgctccaaccccaccgcccctcaaccatcctccctaccttccaggggaattaggaacggagcagaactccatggcagccagtcttggttacccactgatttaatctctgattcccgccgtgaggagaaagaatatgaattactataaacccatctgttccctttctttctaaaaagacaaggacccggggctgggtaataatactgttggcattacgggaggtctctagctcactggtgtctccctccccccttcccccaacagcgcataatttgaagattttctttaaaaaaaaaaatgactttaacgcccccaactaatgttttcctaacagtaataattataaattccaaacaaaaacttagcggcgtgtgtgtgtgtgtgtgtctcttccaggcttttcatttcaatagatctgctaattaaaagctataatttaacaaataatgacctaaccatctcactttgaaatcaaacaaaaacctaccactaaaatgtgggactagatacagataatgaatccgggtgcaattcacactcctgctgggcccaggctggcccccttccagcaacgggcctacgcctgtgattagcagaaatagcttttccagccatttggagcaaacagggaggataagtgagcaatttatgagtctaacagtcgttttggacccacgcccactgctgaaggagcaggatggagcatttatccctcccctgccctcgttcattgacacttggtcaatttcattttctccccggccctctttggcccctgggggagagagttatttcttttttttcttttttttgagatggagtctcgctctgtcgcccaggctggagtgcagtggtgcaatctccgctcactgcaagctccgcctcccgggttcaagccattctcctgcctcagcctcccgagtagctggaactacaggggcccgtcaccacccctggctaattttttgtatttttagtagagacgggatttcaccgtgttagccaggatggtctcaatctcctgacctcgtgatctgcccactttggcctcccaaagtgctgggattacaggcgtgagccaccgcgcccggcccctaaagttatttcttaataacaagccggaaggatttgtgaaaaggaaaactagtaatgaaaccaggtgaagatgcccactgaatccagcatcctaaatgtttaataaaataataaacgatgggctgggtgcagtggctcacgcctgtaatcccagcactttgggaggctgagatagaaggatcacctgaggttgggagtttgagaccagcctggccaacatggtgaaatgccgtctctactaaaaatacaaaaattaggctggcatgttggagggcgcctgtaatcccagatactcgggaggctgaggcaggagaatggctatttttttttttttttttttttttttgagatggaatctcactctgtcgcccaggctggagtgcaatggtgcaatctcggctcactgcaacctccgcctcccaggttcaagcgattctcctgcctcagcctcccgagtagctgggactacaggcgccccccaccaagcctggctaattttttgaatttttagtagagacggggtttcagcgtgttggtcagactggtctcgaacccctgacctcgtgatccgcccgcctcggcctcccaaagtgctgggattacaggcttgagccagcgcgcccggccgagaatcgcttgaacccgggaggcggaggttgcagtgagccgagatcgtgccattgcactctagcctggcgacagagcaagactctgtctcaaaaaaaatttttttaatgtaaaaaataatgcaatgataaaaaacaatgaaagcaagattgtttcccacctaccacgccccttccctgagctgggaattgggcacctgtgccaggttaaacatagcccgctgttctggaaccttccccgcagccccagctcacaccagtccgctgagaggctgcccagctgctgtacaggaaatgctcacgctccgtgggaggagccttcaaacactcaccccttcctggagtcccggcgggacgggagaactggggactctgcgaaagcgctgcggagcgtccaagagctccccgtggagctgaggcaggaagaccgcgcactggctgagaccccaggagcccaaagctggacctggcgcaggcgcagggaggaaggcgcttctgggtgtgcagaggtcacacggccacccgaggacctcagcctaatcctgccttgaaatcttaaatcccaatgtccgccaggcgcggtggctcacgcctgtaatcccagcactttgggaggccgagacgggcggatcacaaggtcaggagttcgagaccagcctggccaacgtggcaaaaccccgtctctactaaaaatacaaaaaaaaaaaaaaatagccaggcgtggtggcaggtgcctgtaatcccagctactcgggaggctgaggcaggagaatgacgtgaacccgggaggcggagcttgcagtgagcccagatcgcggcactgcactccagcctgggcgacagagcgggagtccgtctcaaaataataataatacaaaaaaattagccaggcgtgttggcggtcgcctgtaatcccagctacttgggagtctgaggcaagagaattgcttgagcccaagaggcagaggttgcagtgagccgagattgcaccattgcactccagcctgggcaagaagagcgaaactccatctcaaaaataaaattaaatacgtaaataataaagctttgctaatcccatttaatgatggttttctttttttttttttttttttttttttttgagacgagtcttgctctgtcgcccaggccagagtgcagtggcacgatctcggctcactgcaatctccgcctcctgagtcatgccattctcctgcctcagcctcccgagtagctgggactaaaggcgcccgccaccacgcccagctaattttttgtatttttagtagagacgggatttcaccatgttagccaggacggtctcgatctcctgacctcgtgatctgcccactttggcctcccaaagtgctgggattacaggcgtgagccaccgcacccagccacgacggtgcgtttttcaaaggctgctatttcattgatgaacgcattgacttactcaatcccaaatctttagagcaaaagtatcaaatgtcaattttttgtatcagcagcctctccagcagtgacctgagacaggctttcacagctgggctgccaaggatatgtctattaattgattttgtagaatctgtgtcatcactaattggggatatttgcatttcaaaagaggcagagttcaagttcaagccattcttcctctccttcttttgactaagaaggggctctttaacgacagaattccaccttgtttatctctgcatcttccaagcacctcatggtccttataaagattaaggcggggtggggggacgcgtggtgcgtcacgcctgtaatcccagcactttgggaggccaaagtgaggggattgcttgagcccaggagttcaagaccagcctgggcaacatggtgagctctgtctttacaaaacacacaaaaattagccaggcgtggtggcaggcgtctgcagtcccaactactcatgaggctgaggcgggagggctgctttgagccaggaggcagaggtgacagccgtgatcacaccattgcactctagcctgggcagcagagtcagatcctgtctcaaaaagaaagaaaaagcgctaacacggtgaaatcccatctctactaaaaacacaaaaattagctgggtatggtggcgggtacctgtaatcccagctactcagggggctgaggcgggagaatcgcttgaacctgggaggcagaggttgcattgagccaagatggctccactgcactccagcctgggtttgggcgacagagcaagactccacctccaaaaaaaaagaaacaaagaaagaaaaaaaaagatcaagccttacaatcaagatatacacattaaatggactctgaccatccgtattccttcagactcctcacattgcaaacaacggcttaagtaacaggtcaatacactgcttcaataataaagagggtattttggcccatgtaactgaagagttttgggatagatctttaggcgtggtgagatctagcgttcaaacaatgtaaccaagagcctggtttttctcttaacacatttcccggctctcttttcttgttgcaaatagctccattctccaacctgctcccgtcttcacggttgctcgatggacagtcatttcccagagctagagccatgctcatgtatgtccagcaggtgtgagtctattcagtcaatttccacacaagcaggaggtatttcattcctggcagctccagcaaaattctctgggtatcttactggctctgactggcaactgcctgtccctgaaccatgtgctgtggccaagaggggagtctccgacaggcataagccaatcccattcgaagtgctgaggacaaaggaatggagatgctccaacagaaaagggagttgttttttttttttttttttttttttttggacagggtctcactctgtcgcccaggctggagtgcaatggcacgatctcagctcactgcaagctccgcctcccgggttcaagcgattctcctgcctcagcctcctgagtagctggggctacaggtgcccaccaccatgcccggctactttttgtatttttagtagatatggggtttcaccatgttggtcaggctggtcttgaactcctgacctcaggtgatccacccgcctcagcctcccaaaattgctgggattacaggcgtgagccaccgcacccggccaagagagatcactttagtgagagaacggagggtggacgccaggaaaacaagcagaaatggaaaccacaccggccagctcctggcgggtggaggtgctgggtgggagcagtttccttcctggcttctttctccggcgctcactgcagcagcttcaagggtgagagttggaggccacagagccggggcccatccggctgtatgtgtgcgggtgggggtcgggggacaaaggctgacgccccatgctcaccagtccacccctcgccaagcttccccggctgcccagcacttccttcttcctttccctcacctgccagactcctatctctgaggcagttctgatctctttgatcatgttcacctgcctcaatttcatgcacatgagggaaatttttctgactccttgtaggcctgaaaccccttttttaattctactttttttttttttttttttgatggagtcttgctctgtcatccaggctggagtgcagtggcacgatcttggctcactgcaacctccacctcccaggttcaagcaattctcctgcctcagcctcccaagtagctgggattacaggaatgcaccaccgaacccggcgaattttgtatttttagcagagacgggtttttgccatgttggtcaggctggtcttgaactcctgacctcaggtgatccacccgcctcggcctcccaaagtgctgggattacaggcatgagccaccgcgtgcggcctatttctactttttagagactgggtctcgctttgtcgcccaggctagagtgcagtgacgtgatctttgcttactgcagcctcaaactcctgggctcaagggatcctcccacctcaacctcctgagtagctgggactacagatgcataccaccacccccagctaattttttaatttttcgtagagacagggtttcttaataataatgatatgacaatattgattcgttaattgtaataaatgtactacagtaatgtgatatgttaataacaaggaaatgggttcaggatacatgggggactcttggtattcgcttctcagtttttctgtacatcttttttttttctttctttctcttttgaggcaaagtttcactcttgtcccccaggctggattgcaatgacacagtctccactgactgcaacctccacctcctggatttatgcgattctcctgcctcagcctcccaagtagctgggattacaggtgtgtgccaccacatctggctactttttgtatttttagtaaagacggggtttcaccatgttcgccaggctggtttcaaactcctgacctccagtgatccacccacctcaggctcccaaagtgctgagattacaggcaggagccactcgctcggcctagtttttctgtacatctaaaatcattctaaaaaataacgttcattaaagcacaaaaaatgggtggccggtcgcggcgactcacgtctgtaatcccagcactttgggaggcggaggtgggtggatcacgaggtcagaagttcgagaccaacttggccaacatggtgaaatcccatctctactgaaaatacaaaaaattagccgggcttggtggcgcatgcctgcaatcccagctgctcgggaggctgaggtggaaggattgcttgagcccaggaggtcgaggctgcagtgagctgtgattatgctactgcctcccagcctcagtgacagaataagaccctgtctcaaaaagcaaaaacaaaaaacaaaaaaacaccccccaaaaacccatgaaagatcaaaaagcaactggagagagggaataatagctagcggctcaaagtgtaccttctgtgagggtgggagtggagatgcttcccccaccgccccagcagcagggttatcttcagacagcaggacgtgcaaatgggtgcagacagatctctttgtgggcccaggcaggaagctgagggttcgcatctgatggtatcaatttttcctctgagacaggagaggtgggctacgtgcaatgaaactgcgggttgtacatgatgaagacctgaaggtcctccaagagaagtgcaggaagaacctgaccagcgcaaaagagcagcttcctctcccagcacagatgacaagacataaaacttcagcttttgcaggggcagccccaggtggacagcaccaagcagcagggccttagcccaacaagaggcctgaactgagcgcttcatggggttcaacttttttcttttttttttgagacgatggagtcttgctctgtcgcccaggctggagtgcagtgacgtgatctgggctcactgcaacctccacctcccaggttcaagcgattctcctggctcagcctcccaagtggctgggattacaggcgcccgccaccacgcccggctaatttttgtattttggtagcgacgggatttcgccatgttggccaggctggtctcgaactcctgacctcaagagatccgcccgcccaggcctcccaaagtgctgggattacaggtgtgagccaccgcgcccggcctggagttccactttctgaccagaagagggcgccggggttccacttttgttcttcacgccccacgtttctctttccaaagttgctaaggtttggagtctaggaataaaaagttcccttctgagtccgccacaatgatggcgggaggcggtgggagggtgggcgatggttttgttcctttgctcgttcaccccggtggggagccggggagccagggagcagagtgtgggaactgggtggagatgtctgcggaacggtcacccggacacgggaacacggctctgaacgtcgggagagaagctgcagctgaaaggagacatttgacctttaagggattgtcggaagaagaggagccgatcaaaagggacagaaaaggagtgagtggggagagatgccaaagagaggagcccagttcccgccgggcacgcggttcagcctgtagtcccggcgctttgccaagcgaggcgggcggagttcgagacctgcctggcccacaaaatgagacccaccccacccccatctctacaaaaataaaatacaaaaataaattagcccggcgtggtgacgggcgcctgcagtcccagctgctcgggggaggctgaggcaggagaacggcgtgaacccgggaggcggcgcttgcagtgagccgagatcgcgccgctgcactccagcctggagaccgagcgagactccgcctcaaaaaaaaaaaattaaataaataaagtaattgagaacggaagctttgcagtcaggggaaacttactgagactcagttttctcatctgaaaacggggcgacggataacaaggaccgtgaagaatcccccaacgcgggcgccccagctcagagcccgaccctgggaggctggagccgagggaagcgccaggagcggggtccgcagcctcggcccctcccgcgacccccacttgcggcgggattcaggcggcggcgacccccgagtccctcccctggggcgcctcccgacgcgtcccggccccggtcttagctcataaatctccttcacacagaggcccataaatcaggggcggtggagggaccccccagctccccgcccccgccccactcctggagaggcggggggggggcgcaggaagcccctgggatggggaccgcggcttgttaattacaggtcgcggggcctgatttatggggggggcgggccgcatgctgcgcgggggctgggcatgtctgggggagcccggacgggttccaggaggcctgaggggctcccaagttctcagggccttgttgaaatgacagtctggagcgtgatcaaccgtaacatgttcctatgtaaataaaatataaacgtaataatacgcatggctaaggcaatggagagactgtgtgcccagctgtgctaaacgctgtatcaactctccaaatagttactgaatgcctattgggtgccaggaatcttgtgtgtatatatattctctcccgaacctccccaggcagctctgaaagttagtccttacggttcccattttgcagatggagaaatgaaaagagaagtgatcgacttgcccaagttcccttgattaataagtagtgggttcaggaatcatacacctcgtctctgtcctccaagcttaacctgcttggactaggttatcctaccacctgcttcgctgtcttcctgctccacccatgagctgtgtgacgttgagcaagcgtcttagcctctctgagcctcagttctcctcactgataaaagagcattctgccctatctacctcacaaggagttaggaggatccaatttaaagggagtttatgaaagtgctttaaaaattctctctaaagttctatatgaggctgggtgaggtggctcacgcctgtagtcccagcactttgggaggctgaggcaggcagatcacttgaggtcaggagtttgagaccagcctgggcaacatggtgaaaacccatctctaccaaaaatacaaaaattagctgggcatggtggcatacgcctgtagtcccagctacttgggaggctgaggcaggagaatcgcttgaaccggggaggtggaggttgcagtgaccgagatcacgccattacaatccagcctgggggaaaaaaaattctgtatgaaagagtattaggccgggcgcagtggctcatgcctataatcccagcactttgggaggccgaggtgggaggatcacgaggtcaggagttcgagaccagcttgaccaacatggtgaaaccctgtccctcctaaaaatacaaaaatgagccaggtgtggtagcgtatgactgtaatcccagttactcaggaagctgaggcaggagaatcacttgaacccgggaggcggaggttgcagtgaaccgggatctcgacactgcactccagcctgggccacagagcaagacgccgactcaaaaaaaaaaaaaaaaaaaaaagaaagagtattagtttaaggtgactttaggtactgtaatggataaatccccaaatctcagtggcttaaacatgaagatttatttcctgctcatggaatcattcatgtggtgtctctggtcaggtggtattcctgggcagcaatcccccagccatgattgagggccccagacttcttcctcttgtacctctgccgtcttcagcttgtggcccccatggctggcctaggggacctgaggccaagaggaccgggcatggaggctgcagaggttcgggtgggaagttcgtatgggtgggcctgcaggtggcacgcatcagtcctgctcacagttaccagagaactcagtcgactgcaggaaagcctgaactgctgcattcattacgtcttgtgaagaacaggtgacctcaaaaccgactgctttaagacaaccataaacatgtgttagttcagtgtctgtgagtcagggttttaggagcgaccttcctgggtggttcccttctcctcttgttcatgatggaggatgcacgtgagtcccagagctcctgcagcccttttgccactatgagggaagccaccttgagaaagaaaatatgggtcaggcacggtggctcacgcctgtaatcccagcactttgggaggccgaggtgggtggatcacaaggtcgggagttcgagaccagcctggccaacgtggtaaaaccccgtgtctactaaaaatacaaaaattagccgggtgtggtggcacatgcctgtaatcccagctacttgggaggctgaggcaggataattgcttgaacctgggaggcagaaattgcagtgagctgagatcttgccaccgcactccagcctgggcgacagcgagactccgtctcagggggaaaaaaaaaaagcaagcaagaaaatacggaaaaaggccgggtgcagtggctcaagcctgtaatcccagcactttgggaggccgaggcgggcagatcacaaggtctggagattgagaccatcatggctaacatggtgaaaccccgtctctactaaaaatatttttaaaaattaggcgggggtggtggcgggcacctgtagtcccagctactcgggaggctgaggcaggagaatgtcgtgaacccggaaggcggagcttgcagtgagctgagatcgcgccactgcactccagcctgggggacagagcgagactccgtctcataaaaaaaaaaaaaaagaaaagaaaatacggagaagaggtatgaaagaatcacagaagaagagttatagaccaggcgaaaggataatcaaattcctgtggaagtgtaaagggccaagaacacccaacagaattctgaaaatgaaaaacgagactgcaagattgcccaggcagacaggcattacccagaaatggttggaggtggcttggtagatatgtggcattacacatcactggaggcagggtgaacaggtcaccaaagggagccggaaagattggtaactgggttccaaggatgacaataataattaaagcaataataatagcagcaataggaatgtagtaatggatgccatttattgacacctacacagtgttagaaatatacttttttttttttttttgaggcagggtctcgctgtgacccaggctggaatgcagtggctcaatcatggctcactgaagcctcgacttctcgggctctagctgggatcacaggcacgcaccaccatgcccagctaatttttttttttttttagagacggggtcttgctatgttgcccaggctggtctgaaactcctggcctgaagcaatcctcctgccttggcctcccaaagtgctgggatgacaggcaggagccaccgcacccaaccagaagtctactgttggtttctctcgctgtttcctcacaccaaatccacaagggaagtattatcttttttcgtttttggtgtttttttttgagatggagtctctgtcactcaggctggagtgcagtggtgagatttcggctcactgcaacctctgcctcccaggttcaagcaggtaatgcctgtctgcctcagtctcccaagttgctgggattacaggtgcacgccaccaggcccggctaatttttgtatttttagtagagacgaggtttcaccttgttggccagcctggtcttgaactcctgacttcaggtgatctgccctcctcagcctcccaaagtgctgggattacaggcgtgagccaccgcgcccggctaatttttgtatttttagtagagacggggtttcaccatgttggcctgactggtcttgaactcctgacttcaggtgatctgccctcctcggcctcccgaagtgctgggattacaggcgtgagccaccgtgcccggcctataattcttctcaaacagatgagaaagcccaacctcaggagggtagcaaagatctcttgagcccacacatggctctcagcctcctgggcagcaggtaggaaccctgtttttcctcccaataacagagctctttcctgagagttcctggccttcagcagccctgggcccgggaggcagagctcgctgtccacaccaagccagcacccacctacccaccaccacccgccctccccacaccgccctggacctggaattcctactccacactgactctgggacggagctaagcctgattagaccccagctaaaagcacagaggcctctttgtcatttctttaacgagaagccaatcgccaggtcattagtgggtggaggtgatgagcagtttggtactggggtgggagggaggagaatgctcttgtttatctggatgatttacagctgcagtggccaagctggctggggaaaggagcagagggtaggaagaagagaaagttaatattcacagagttccttctaggagccaggccctgtactgacagcgtaaaaacacggtctttcatttaatcctacaacaaacctgacaaagcagtaccactgcatacctcattttacagacaaggaaacagaggctcaaacaagtgaagcatcagccaggcgcggtggctcacgcctgtaatcccagcactttgggaggccgaggcaggcggatcacctgatgaagcagtaccattgcatacctcattttacagacaaggaaacggaggctcaaacaagtgaagcatcagccaggtgcggtggctcacgcctgtaatcccagcacttgatgggaggctgaggcaggcggatcacctgaggtcaggagtttgagaccagcctgcccaacatggtgaaaccccctctctactaaaactacaaaaattagccaggcatagtggcaagcacctataatcccagctacttgggaggctgaggcgggagaatcgcttgaacctgaaaggtcgtggttgcagtgagccaagatcatgccaccgcactccagcctgggcgacagagcaagactccgcctcaaaaaaaaaaaaaaaaagaaaagaagtgaagcatcttggcccaggctacgcagctcataaatgataatcttattccagagcctacacaacaccctgctgttcagtgttacaggcagggctggggtgagtgcaggtgaaggaccaagcaatattccagattagagcaagaaagaacaagttgtcggcaggtgctggatggagggacgctgctctgtgggctgggagtggcagcagtggagaggaccaaatgtgtgcatgagcttgttggaaagaaaccctggggtactgagtatattctccagaaaaaggataataataacagtaactaattattaacttttttcttttttgagatggagtcttgctctgtcacccaggctggactgcagtggtgtaatctcggctcactgtgacctccgcctccccagttcaagagattctcctacctcagcctccccagcagctgacactataggtgcccgccaccacacccggctaatttttatatttttagtagagacgggatttcaccatattggtcaggctggtctcgaactcctgacctcaggtgatctgcccgcctcagcctcccacggtgctattacaggcatgagccaccgcacccagccaataataacttttttttttttttttttgagacggagtcttgctctgtcgcccaggctggaatgcagtggcgcgatcttggctcactgcaagctccgcctcctgggttcatgccattctcctgcctcagcctcccaagtagctgggactacagacgcctgccacaatgcccggctaattttttgtatgttcagtaaagacggggtttcaccacgttagccaggatggtctcgatctcctgacctcaggtgatctgcccgcctcggcctcccacagtgctgggattacaggcgtgagccaccgcgcccagctgatcataactaattattaagtgcccacaatgtgccaggtaccgtgctaagggctttctgtgcatggtgtcatttaatgctcacagctctcttatgtggcagttaccaattcattttacagatgaagaaacagagtgagggtcagagaggttaagtcacctgctgcacctcttgaagttgggattggcttgggagtcagcgaggttgaccaggatgactgcttatctctacgctgtgttgtcaggattcttggttggaaacaaccaaatccaacttgagcagaaggaagaggcaggtattggctctgaggtagctcacaaaatcaacggaaaaaaagtctagggcacagtcactcacgcctgtaatcccagcactttgggaggccgaggcaggccaatcgcttgaggtcaggagttcaagaccagcctggccaacatggtgaaaccctgtctctaataaaaatacaaaaaattagccgggcgtagtggcgggcgcctgtaatcccagctactcaggaggctgaggcaggagaattgcttgcccagggacacggacgttgcagtgggccgagatcgcgccactgcactgcggcctgcacaacagagtgagactccgtctcaaaaagaaaaaagaaaagagtctgggaaattaaggttgggaaactcgtaagaattataggaaactgggcagctagacccacggccaagccaggaacctcctctagatgccagtgtaggacgtggagggccacaggccccgcactggcaccgtgatttctccactgttacctgtttgtttctttgggacaccactccagattcaagtcaggcagccaagtgcctggactcgcatctgtcccagttaccagaaatctctgccacccagagccccaccatggaggctcccttctccccagataggaaggctgttcaaatgccacatagcaaacagtgataacaaaaacatccaccacggcacacgcctgtagtcccagctactcaggaggctgaggcaggagaatcgcttaaacccgggaggtggaggttgcagtgagccgagatttcgccactgcactccagcctgggagacagaacgagactccacctcaaaaaaaaaaaaaaaataaccgaagtcgtgggtgccctgggtctgaggtgaccatatgccactggctttcttgtccccatgtccatggctggacctttgtagagagagtctctgaactaaggcttctgctcttaaaggagaatatggagacgacacccctttttgtcatctgctttatcccattggcacccccacatgtcaattctattttccaaacaggtgttgactccgtgcccttctctcaccactgcctgcatagctcaggcccccccttcctccaggatccttgcttcctaagtggaatttgtcttaacatccattctccacactgctcaaagagctctagctgtaattcaaatacggctgacattcctctgcttaataaccttttgcagtacccagctgcctacagggcgaaaagcaagcttttgggacgacgcctggtgatctccagccttatctcccgtcactccctggcctcacatttggtggtttggcaaagtcactttcctgtatttttcgcatcatcctgtgaccgcttacacttccagggcctggcacctgctgttccctctacctcctgtctgcttggcaaactgctattcatcctttgaaatccagttcagggccgggagcggtggctcacgtctgtaatcccagcactttgggtggccgaggcgggcggatcacttaaggccgggagttcgagaccatcctggccaacatggtgaaaccccgtctctggtaaaaatacaaaaaatagctgggcacgatggtgggtgcctgtaatcccacgtactcgggaggctgaggcaggagaatcgcttgaacccgagaggtggagcttgcagtgagccaagattgcgacactgcggtccagcctgggcgacagagcgagactcggtctcaaaaaaaaaaaagtttttgttgaatgagcgcatgaaggggcagaggctgcaattgcgcccctacgtcttccacaccgggcgtgtgggttgaaacgccagggtctcgcctgggagagaaggaggctcagggcttcccgggacccgctctccggagggggtggggtcgaggcccccgtgagcggctcccggactttctctcccgggcgggcgttccgtcctccctcggggagcggcgccggaacttccggaggaagagccggaacttttgaagcccaggccccgcccggcgctaataggcacctacgcggccgccggcggaaccgccagaccctaaatcacggcgccccgcccgcccccgcccgcccccgcccgggccgagaactcgcgctcccgggcacgggcaggtgccgcggaaatgccgggcccgccgctcgctttgaagtcggccgcgccccgcagcgcccgggagtcccgggttccaggagggggcgcctctcccgggtcctcggggttcttcgcgtggggccgtttcctgacgtgcgcggggaagggcgggagcggccgggaaacgccaccgggaaacgcgcgctgcgtgggcattttctttgcttttactgaccttttttttttttctggtttattttttgttgtttttgagacggagtctcgctctgtccgccaggctggagcgcagtggcgggatctcggctcactgcaacctccgcctccctggttcaagcgattctctgcctcagcctcccgagtagctgggactacaggctccccgccaccacgtccagctaattgttgtattttagtagagacggggtttcaccgtgttggccaggctggtcttgaactcctgacctcaagtgatccgcccacctcggcctcccaaagtactgggattacaggcgtgagccactgcgcccggcctctagctgttttataattcgacatatattgcagatttgggggacatagaacctgggaaatacagatgtccttaggatgctttcatcctagtgggcaaggcagacaatcacagaagtaaatacatacactctgcttcctaatgccttattattttcttttatggagaaattcacagtttgaaataatggggttattggcaatgctcttttggcgagatggatgtgaaccacacacccattccaatgccataggccttggcatcttagaggcatttggattgtgactgggaatgagtggccttcaggcgctccaaataactcagctgtggatgccggaaattctactgggggtctttctttgggaataaacatcatcttttttctgagaccctctttcaaatgcaaatccctgggggaagaggacagaggctgctcattgagttcataacctggcagggctgtgtcacaagatggggctgcccgagggctctggaccccaaagatgcccctgatgtggacccagggctgcaaagggatcttccccgtcaccctctgctgctgactcatcccagctctgcctgcagaaggggagtcaaagggcagtggagggagagtcaggcccaaccaaaacccgaaccccaattgcagccagccgccctccatagctgaaaaagccggaagctctgggtcagctttacctgcagggccctgcgcctcccatatgagtcctgccgggacactcatgcttttcctcagtgacatctctgtggttgcccacgggacttgacaagaactttcaaggttttgttgttgtttttgttgttgtttttctgagacggagtctcgttctgtctcccaggctagagtgcagtggtgcgatctcggctcactgcaacctccagctcctgggctcaagccattctcctgcctcagcctcccgagtaactgggattacaggcgcctgccaccacgcccggctaatttttgtgtttttagtagacggggttttatatactctgttggccaggctggtctcgaactcctgaactcaagtgatccgcccgcctcggcctcccaaactgctgggatgacaggcgtgagccccagtgcccggccctctgcctctttttattcctatcagctctcctgctagaagccaaacttagcaccttatctgggaatggggaggaagaatgtggaacccagacaccccacagcggccccagagctaggcagggcaaggtccccggggcagcgtggccgggctgcccgtctggtccccgcttacaagaacctgcaagcttccctccttgctttccttcttcccctcggttcctcccccgccgacctacctggaggccgataataaagcaggaggagggagatggatggacgggagggcggggcgccgcgtggtgccataaagcccagctggaaggggcctgtctcgggagtgtccagccccaggagccggggaccgtccgcgtcgcgagccgggccaaggcagtgggcagagggcagagggcagagggccggggctggggcagagggcgagtgcccgggaaggccatgctgcggggcgcgccaggactaggcctcacggcgcggaagggggccgaggactctgcggaggacttggggggcccctgccccgagcccgggggcgattcgggggtgctgggggcgaacggcgcttcctgcagccggggcgaggcggaggagccggcgggcaggaggcgcgcgcggccggtgcggtccaaggcgcggcgcatggccgccaacgtgcgggagcgcaagcgcatcctagactacaacgaggccttcaacgcgctgcgccgggcgctgcggcacgacctgggcggcaagaggctctccaagatcgccacgctgcgcagggccatccaccgcatcgccgcgctctccctggtcctgcgcgccagccccgcgccccgcgggccctgcggacacctggagtgccacggcccggccgcgcgcggggacaccggggacacaggcgccagccccccgccgcctgcagggcccagcctcgcgcgcccagacgccgcccgcccctcggtgccgtccgcgccccgctgcgcctcgtgccccccgcacgcgcccctggcacggcccagtgcggtggccgaggggccgggcctagcacaggcctccgggggaagctggcgccgctgtccgggggcttcctctgccgggccgcctccctggccgcggggctacctgcgatccgcccccgggatgggccatccgcgctcctgaccggcctcgaggcaccggctgggctgcagggaggccgggctggcagctggactataaaacccgggactgcaaaggcgtcttggacagagcagaactggaccggctgagacctggcgtggaagagaaggagctcgccagagagaaggagctccgggacccggggttgcgcccccacatcccagcctggggcagagagaaggagctccggggcctggggctgcgcccccacatcccagcctagggaggcagttgccagaaaggctcaggatcctgaactcatcttggactcgaactcgtcttggaatgccgccttcgcactcctgcgcctccgagccctgtgtgttctcgatgcttttaggagagtgagggctttgaggcaggaggtgtgggagcgtgggaatgcgggtggggcctgctgtggtctcgtgggcacatgagtgcggagtccccttccctgcctgcgctgctgcccaagcctgatccgggagaggcaggatccgggagaggcaggcaggggcagcagccaaataaaaggaaaaactcatttctctccgataccacgactccagtgggccccgtggcccagggtggcaggaacgcctgagggctgggggctctccttggaatgctgggcggggcctaaggcccacaggtaggcgcctgggggaactcattcatggcaagaccccaggtgtggctgagcactgtgggagcccaaggggaggaaagagacatccagagacccctcctccctgagtcccctggggtggaagaggatatcaggagaggggtcacggggcctgggagtctaaggatggggtcagccccgtctctggacctccctgcagagctgcctggaagcagccacagtgaagggggactctggccaggtctcagggaaggaggccaagggcagggctaggattgggggccggtaagtcctgcgtgcatgtaccccgagcgacaggcaggaagagctcccagggaaccgtgggccagggcccccataatgaggggccgacttggaacccaggaaggattctggggagggggttgagtgagggcagaggggcctcaggccaagcctgctgagctagtgagagacacagccagctgccccgagagttttgtccagagagctgccctgcatctgagatgagctggtgtctggcccggctcagggtaagggtctaatattgcaagggctgcctgctgggccagagcccagaggtgctgggggagcgctgggctcttgccaacaggagagggaagggttccccacagctagctcagagtgcggatcccacagaagctagagaaacgccattaggcgtaaacccagggagagtttcccagagcacgtggggtgaggctcacctctacagttaaaagtgcctctgctgtctgcaaaccccagccctggctggcacgctgagcatcctgtccccagccacagcccttagggttcccaattgcgcagggaggctgtgacacagaccacgggaaggctttgactctattgagagcggacgtgggtctagccaggagcagcaacgcaggagatgctggccccagccctgcccgccgagccccacagtgccacgggctgccagtgagaaggaaagagccaggcctgccctggtccagcccctgctcagccgcctctctcagcctctagttcctcccctctgacatgaatgattccaggatggctgtgaggattgtaagtggttcgtaatggaccgtttctggcaaacagaaggtgttcacaagctgtcatgtttgtgtactataaggatcctgtgagaaaccagcttggacaaggctgtagccatgtttcagcctcaggtatttatcctctggaaacacaatataaggaccagcaagtcctactttgctaaattccagaactgaaagaagtaagggggccgggtgtggtggctcgcgcctgtcatctcagcactgtgggaggcccagaggcaggtggatcacctgaggtcaggagttcaagaccagcctggctaacatggtgaaaccccatctctactaaaaatacaaaaattagctgggtgtggtagcgcatgcacctgtaatcccagctactcgggaggatgaggcataagaattgcttgatcccgggaggcagaggttgcagtgagccgagatcgcgcgccactgcactccagcctggccaaaagagcgagattctctcaaaaaaaaaaaaaaagaaaagaaaaagaaagaaaggttcttctcccccatcctatcacactctcagcctggaaatagcaaggacacccctgcaggcagaatcctgatgcggcagccccatgagttcagtggcagggatgtcacagttctggacttccagctcctcactgaccagctgagtgatcttgggccaatcacctggcggctttgagcctcggtgttcccgtctgtataatgggctagaataagtacttacttcataggctgttttggagagtaaatgggaggatgcatttaaagcactagcacagtgcttggcccacgtaaacgctgactgagtggaggctgttcagacatattcagttcacaaggttgttacaaggagagaatgcatgggaagctgttttatcaactgtaaagtctgggacacattggctgctagcatggtttttccggggctgtgtgtttgggtgctgtatgtttgcctaggattctgagtttgtgatatgtacatattttgtgtgtgctcacatagatgtgtggctgcgtggatatttgtgtgggtatctatatacgtatcaacctaacaggtgcttcctcatctctctgatgccgcaggggatcctgggcctgtgtagcctccgttacgtgctgttgaggttttctggaacccttgcttgatttttctgtctgcttcccaagatcgtgtccattctccaagatgacttatatgtggtgaagaaaagattttatgattattaaaaaatggtggtttccactgagatcacatgggtttgcccaaatattgtttaaaaggcacaatgataggcatgaaatgcatagagaaaggaaaatgccaggaaggaaagacgcacgtgtaagacagagccgccaagccatggctcactgtagccttgacctcctgggctcacgtgatcctcccacctcagccttcctagtagctgagaatacaggcgtgtgccaccatgccggctaatttttgtattttttgtaaagatggggttttgccatgttgcccaggctggtctcaaatacctggggctcaagtgatcctcctgccttagcctcccaaagtgctggcattacaggtatgaggggcctggccttaattttctttctttttttctttcttttttttttttttttttttttttttgagatggagtctcgctctgtcgcccaggctggagtgcagtggcgtgatcttggctcactgcaagctctgcctcccgggttcacgccattctcctgcctcagcctcccgagtagctgggactacaggcgcccgccaccacgcccggatcattttttttcatatttttagtagagacggggtttcactgtgttagccaggatggtctcccgacctcgtgatccgcccgcctcagcctcccaaagtgctgggattacagaaatgagccaccgcgcccggcctaattttcattagagtcttcatcattgttattttaaaaggtgaaaaattaggcccagccaacatggcgaaaccccgtctccactaaacaaacaaaaattagccaggcatggtggcaggagcctgtaatcccagctacttgggaggaggctgaggcaggagaatcacttgaaacccagaaggcggaggttgcagtgagccgagatagcaccactgcactccagcctgggcaacagagtgagatttggtgtcaaaaaaaaaaaagtgcaagatcagtctccttaggaaaactcccaagaggagtagggatgtgttttgagcaaggacagaaaggagacgcatccccagtgggttccttcaggtggacccgcctccctggatgtgaaattctggggtgcttgctgatgggcgcacgattacgtcaatgtttatcacactttacaaaaggacgtgcgtgtgtgtgtgtgaatgagtgtgcgagtgtgtgtgagtgaatgtgtgtgggggtgactgtgtgtgtgtgagtgagggtgtgtgaatgtgtgtgggggtgagtgtgtgagtgtgtgtgtgagggtgtgtgaatgtgtgtgggggtgagtgtgtgggggtgattgtgagggtgtgtgaatgtgtgtggggtgagtgtgtgagtgtgtgagtgtgtggggggtgagtgtatgagtgtgtgtgagtgtgtggggtgactgagtgtgagggtgtgtgaatgtgtgtggggcgagtgtgtgagtgtgtgagtgtgtgtgaatgtgtgtgtggggggggtgtgtgggtgagtgtgtgagtgtgtgtgagtgtgtgggggtgactgagggtgtgtgaatgtgtgtgggggtgagtgtgtgagtgtgtgagtgtgtgagagtgtgtggggtgagtgtatgagagtgtgagagtgtgtgtgtgagagagagtgtgtgagagtgtgtgtgtgtgtgtgtgtgtacacagatgtcaggaggctactctctcactcctggagcagaactcctgaacggggcccaggaaggcttcagtgagaagaggaattggctcaattgcaccttccctgtcagccccgtagggtttcctgacacccagtgagacgccaaggatgaaagggctgtggggcagagatatgaggaggatgtttctccttcccctgggcttcggcttgaacttgcttatgcttctgaggtttcttccccgccccacctcaccccccaaaggacccctcatgggcaggtccactcccccgcactgttcacatccctgtcctctctcagcatccctcgcatgtagggtgctcaaaggttggggtcaccgccgggagcccaaatccgctgctgcctccctcgggctccctccactctggtcattcccctcatcactacctgccacgaggtggcgctgagactccagcatcccacacgggcggagcaaacgtgggtccctaattacccccgaccccagcccgcccaggcaacctcgtgccagggactactctggggacttcttagttttttctttcctccttttattccatcaagaatttaacatatagccgggtgcggtggctcacgcctgttatccctgcactttgggaggccgaggtgggcagatcacctgaggtcaggagttcaagactagcctggccaacatggcgaaaccctgtctctactaaaaatacaaaaattagccggacgtggtggtggatgcctgtaatcccagctactcgggaggctgaggtaggagaatcgcttgaacccgggaggcagaggttgcagcaagcctagagccaagatcacaacactgcactccagcctgggcaacagagcaagactctatctcgtgagccaccgtgcccagcctgaaaccccaatttttatatgaaatgaatttttaaaatcatgtgttgaggccgggcgcggtggctcatgcctgtaatcccagaactttgggaggcagaggcgggtgaatcacctgagttcaggagtttgggaccagcctggccaacatggtaaaaccccatctctactaaaaatacaaaaattagccaggcgtggtggtgcatgcctgtaatcccagatactcaggaggctgaggccggagaatcgcttgaacctgggaggcggaggttgcagtgagccgagatcgcgccactgcactccagcttggtgacagagcgagattctgtctcaaaaaaaaatttttttaattttctactaggcacatttttagaacgtaaaaataagcagatgaaatcaataatgttgattttaataacgttttatttatcccaatatatccaaaatattatcctttcaatatacaatcaataaaaagtattaatgagatattttccattctttttgtgtttggacccagttttcgatgtcttgtgtgtattttacatctcaacttggatgagtcacatttcaagggctcggaagccacatgtggctaggggctaccgaattgggctgggtagctgtcgtccctccacccaggggtcagctccaaggctgtaccatggcattctgcccaactggataccggcttggagcctaaggggtctcagggacccacctagccaccctgtgaaggagctttcctgttatacaggattatcgtatttctggacgctcataagcaggggagcccagctcgctcccaggccccacacctggcctccctgaggactgagaggaggacgaggcggctccccaaggtcttcattttgcaaataacaatgggtttcctttattgagcacaattctctctctctctctcttttatttttttgagaggagtctcactctgtcacccaggctggagtgtagtggcatgatctccactcactgcaacctctgcctcccgggttcaagcaattctcctgcctcagcctcctgagtagctgggattacaggcatgtgccaccacacccagctaatttttgtatttctagtagagacggggtttcaccacattggtcaggatggtctcaatctcctgacctcgtgatctgcccaccttggcctcccaaagtgctgggattacaggcgtgagccaccatgcccagcctgagcaaaattcttaatttaatatagtcaaatttatgaaacctgcaaagttctcccaaagccacaaacattgttttttatttgtttgtttgtttgtttgtttttagttggagtctcattctgtcacccaggctggagtgcagtggtgcaaccttggctcactgcaacgttcgcttcttcccaggttcaagtgattctcctgcctcagtctccaaagtagctgtggttacaggcacccaccaccacgctaatttttgtatttttagtagagacagggttttgccatgatggccaggctggtctcgaactgctgacctcaagtgatccacctgcctcagcctcccaaagtgctgggattacaggcatgagtcaccgtgcccggctgagttttcaaatcttattcatttccaggtgtcctttcagccccatatctcccactgagctgtgcggcaggatctcggctcactgcagcctggacctcccaggctcaagcgattctcctccctcagcctcccaagtagctgggattacaggcatgtaccaccacgcccatatattttttgtattttttgtagagatgggattttgccatgttgcccaggctggtgtcaaactcctgggctaaagcagtccttctgcctcggcctcccgaagtgctgggtttatgggcatgagccatggcatcccgcctgatcgtaggattttaaactatttcatacaaccactttcaaaccacacacacacatccgtggcggctccagatcacacttgtaaaacaatgtaaggaggggcgtcaggaatatagaaagagatgccgaggatagagaagaaggcagagacagagggagaaaacctaagagagaacaaaggaggagaatccgataggacaaacagcctgaggcccttccgagctggcatctgcccggagcagctgacctaggggctctctgccaccggctctttagcaccccagaatcgttctgatgggcatgaggtggacccaacactcccccttatcctcttccccacctggtggtgagctacgtagaaacctactcatggggccctgctggtccatgcagggtccaggcaggatccaggggctaccctggtgctcacatctccccttcccttctggagtcgggagccaggctttggcctggatgctcccagcggttgggggtcagggtctgggtgggatgtaatagggggccctaaggtccagcatttcccaacagaaagaaagaagtacacgcttgctttggaagaagcagcggagggctcagttcccaggacagctgaagacacatccctgtggggcccaaagtgtctttctccccatccagagaccctgcccagaggagcaggccctggagctgcaacagaaaccggaggctggcccaagtccctctgggctgggctgggctgggctgggcagagctgggctgggctgggctgggctggggcagaggcaaaatcctgccagggtggttctctggggagaggggaattgaaaaggaaaagcatcaccaaggagggggagagggagggaggccgtgtgcgcacacgcacacacacacacacacacacacacacacacacacagcctccctgactgagcctgagcctccctgggaagaggcgcattcttctctctgctctctgagctttccgttgcttccctgcccatctgtgctctcagcagcaccagcaaagttggcctcaaacttgaacaaagctgcaggctccagcgtctttctgggagctccgcgggggcagcaggcaggccccagcctctgaactcagctggcttgagaagctcagcccaacccttccagcacccagccggccctccgtctcctgagggacgcccctgcccccgacctggaggccctcagtctgggctggggaatggcgcgctgaggtccctccagagccccttgtcccagcctggagctgcagccgcgcaaggcccaggcccccatggcccacccggtgcagtccgagtttccttcagcacaggagccaggctccgccgcattcctggacctgccggagatggagatactcctcaccaaggcagagaacaaggatgacaagaccctgaatctgtccaagaccctctcggggcctctggatctggagcagaacagccagggcctacccttcaaggccatctccgaggggcacctggaggccccactgcctcggtccccctcccgggccagctcaaggagggcgtcctccatcgccaccacctcctatgcccaagaccaagaagcccccagagattacctcatcctggccgtcgtcgcctgcttctgccccgtctggcccctcaacctcatccccctcatcatttccatcatggtaagtgctggtctttgttccaggggcaggggctgggcccaggggtcggcaggtgtttcccccaggcaggcaccaaacactgcccagggtgtggagaagagagagctgggagtggggggcttggggaagactcctttcctcactggcctcctccttcctcttagagaggggccccggggctggaagagctcctgctctgttctctcatctctgcttctgggcatcagagctcgactttgcacctgtgtctgctggggaggggccctcagggagctgcctggcgatacatcccgcggggcagaaagatagccaggctgggggtcttgctgttttaggagggacgggcggtcccaaagggtcatcgccaagtggggctgtctcagcagaggttgcaccggacgggggtcccagcgcccatgtgtcctcccaggccacctggacatgctcccagcctctgccggctccggtttccaagagtcgcagcggcttccctgccgtaccctgagggctccggggccaggctcccccgaggggcgcacaaagcggggagagctggcagactgctcctcccgaggcgtggagttccctccggagccctctgcagctccacagctacgctgacttcagcctcgtcttcagggcaggggaggtctgggtcacaagtgaaaaatgtgagagtcagagggcatggcctgccatgcccaggaaggggcatggggccgggtctgtacttccatgggattttgaatgaattgtcttagattgtctccaacccaagccctttgggtagagctacttataaaggattccatagaaaatgtcagcagatattggcaagtgacttttgaagtccaggaagaagcgagagttatgaaagggtggggagagggagaagcagggctcagcaatgatttcagagtgaggtcaggggcagggggtagaaaactgctggcccaggctggtcagggccagaggactaggtgtggaggggggttcccaagagtgactccctgcagagtcaccatcaccgaacccccaggagctgtcctctgagaaagctcctatttcttcaaaccactctgtctacctcagggaggcccagtctcccagcagggaagccttccccatcccaccaaagccagtactacctttcaggacatcagggggcactggcagccttcctgagtctgagggacttggcatgggctgtggaagcagggccgggcaggggccttccgggcagctctctgtgatgcctgctgtacctggggaccgcttgcaggtaaagccaggacccaggggtgcagccagtggctgtgggcagggcctgcctcttggttacagggaaaggccccaggaggggaaactggatttggggagggaagctacccaagggctcaggagaaaacagctgctggaatccatctcctggtggggtggcagggtgcaggctgggcaggacctgcctctgacaaacagagcctaagcccaaggcaatgagaccacagaacctgccccagtgagtttctatatatacatatacatacatgtacatatatgcacatacatgtacatatatgcacacgtgtacatatatgtacatatatacagatatacacatatgtacatatacatatgtacatatatacacacatatgtacacatatgtacatgtatacacatatatacatatatgtacatatatacgtatatgtgtacacataaatgcacatatgtacatatacacgcatatatgtacgtatacacgtgcatatatgtacgtatacacgtgcgtatatgtacgtgtacacgtgcgtatatgtacgtatacacgtgcgtatatgtacgtatatgcacgtatatgtacgtatatgtacatatatgcacgtatatgtacatatatgtacgtatatgtacatatgcgtatatatgtacatatatgtacgtatatgtacatatgcgtatatatgtatatatgtacgtatatgtatatatattttaagacagagtcttgctctgtcacccaggctggagtgcaatggtgcgatctcggctcactgcaacctctgcctcccaggttcaagcagttctcttgcctcagcctcctgagtagctgggattacaggagcccaccaccacacctggctaatttttgtatttttagtagagacggggttttaccatgttggccaggctggtcttgaactcccgacctcgtgatccacccacctcggcctccgaaagggctgggattacaggtgtgagccactgaacctggcctgtttctatattctttaaaggttttgttttgttttatttgaaacggagcctcgctctgtcgcccaggctggagtgcaatggtgcgatcttggctcactgcaaactccgtctcccaggttcatgcaattctcctgcctcagcctcccaagtagctggcattacaggcgctggccaccatgcctggctaatttttgtatttttagtagagacggggtttctccatgttggtcaggctggtctcaaactcctgatctcaggtgatcctcccacctcggccgcccaaagtgctgggattacaggcaagtgcccaccacactcggccccttttacgtttttgagtcaggtgtgatgaataccaggctgggcacagggaatacattgctaaccagacactgttgccaattccccagaacctccagtccggcaggaaggaactcttaaacagattcttatgacatatttccagaagtgcccgtggtagacataaagttaagataatgagctgggaaagtcattcaaacggctcttctccctggcattcccatctgcaaaatgggtataacctcaatgcctgcacgagagagccgtgagggggtgaaatgagacgggccacacccagtgcttcagaacaacaccaggagggtgtggggctcttacaggataatgggtacgtaagtggcagcggggagcctcccgggggaggcaggaagccatcctggtgttttagaaatggctttgttgagatataactcacataccatatgatgcacccatctaaagtgtattcacagacaggtgcaacaaccgcagtcaatttggaacatttgcctcatctccaaaagaaaccctgtaccctggccgggcgcagtggctcatgcctgtaatcccagcactttgggaggccgaggcgggtggatctcctgagatcaggagttcgagaccagcctggccaacatggtgcaaccccatctctactaaaaatacaaaaaaattagccaggtgtggtgtcatgtgcctgcaatcccagctactcgggaggctgaggcaggagaatcacttgaaccctggaggcagaggttgcagtgagccgagatccagccactatactccagcctgagtaacagagtgagattctatctcaaaaaaaataaaataaaataaagggccgggagtggtggtcatgcctgtaatcccagcactttgggaggccgaggcgggcagatcacgaggtcaggagattgacaccatcctggctaacacggtgaatccccatctctactaaaaatgcaaaaaattagccgggcatggtggcagtgggcgcctgtagtcccagctactcaggaggctgaggcaggagaatggcgtgaatccgggaggcggagcttacagtgagctgagatggtgccactgcactccagcctgggcgacagagcaagattctgtctcaaaaaaaaaaagaaagaaagaaagaaagaaaagaaagaaagaaaccctgtccccttcagctgtcactctccatccctgcccctcccagccctgagcaaccactcatctcctttctgtttctctagatctgcctattctggacatgaaatgataaatggaatcatacagtatgaggcctgtgttcctggcctcgttcactttgcatgtcgtcttcaagcgtcatccctgccgcagtgccgtagcagcacgctgtaggctttgcagccgagaggagtgtggttggatctccattttgctggatcagtctggggcagggtgagaggaggggttggaggggatgaggctggcgttcagcagaggggaccctcgtaggaatgcaggcaagaggcgaagaggccaggaccagggccagggacagggccagaggtggctctgaaaccctctaagagtgggttgtaccgaccattcattcattcagtcgacttgaacagcaagttgcttgtgttgagggaactaagtagtagaggacggtcaggcccctgtgaatgaatgtgcctcttttatttatttatttatttatttttgagatggagtcttgctctgtcgcccaggctggagtgcagtggcgcaatctcaactcactgcaagctccacctcccgggttcacgccattctcctgcctcagcctcctgagtagctgggactacaggcgcccgccaccacaccctgctaattttttgtatttttagtagatacggggtttcactgtgttagccaggatggtctcgatctcctgacctcgtgatccacccgcctcggcctcccaaagtgctgggattacaggcgtgagccaccacacccggctgaatgcacctcttttatgaaccaggcaccgtgttggcatttgggaagcagatggatgggataagtagacggtctggctgacatggcagaaggctgcaaggggtgtgatgggagagggaggcagcagggacttgcttaggaatttaagttctggctgggtgcagtggctcgtgcctgtaatcccagcgctttgggagacaacaagtggatcacttgaggtcaggagttcgagaccagcctggctaacatggtgaaaccccgtttctactaaaaatacaaaaaattagccaggcgtggcggcacacacctataatcccagctactcaggaggctgaggcaggaggattacttaaacccgggcggcagagattgcaatgagccaagattgtgccactgcactccagcctgggcaatagagcaagactccatctcaaaaaattaaagagggctgggctcagtggctcacacctgcaatcccagcactttgagaggccaaggcgggtggatcacgaggtcaggagttcaagaccagcctggccaacatggtgaaacctcatctctactaaaaatacaaaaattagccgggcgtggtggcgcacgcctgtaatctcagctactctggaggctgaggcaggagaatcgcttgaaccaggactcgggaggcagaggcggaggttatagtgagctgagattgtgctactgcactccagcctgggctacagagcaagactccatctaaaaaatgggaagggaagggaagggtaaggtcgaggaggggaggggagggggaaactggagccacatcagagagatgtgggggtctctaacatctagggggagggccgaggggagtggacagaaaagtattttgaaaaggagattccaggaggtggaaggaaatcttggaaaggggcagagacacccagggaggagagagtctgaaggagggagcggccagctccgaggccgctcaggttcaatgagcatggaagcatccactgccttggccacgcatagatccctggtgaccgggggatggaggggccttggcaaaatgggagggatgatggatgagctgaggtcctggaagcagtggagagatgcgatccagagcccaggaagaaagacaccctgtccctggcagcctgaaggagaggccgtgagggcagaggccgatggaactgctcagagggaaggggctggctcacgctgcacggccaccaggcctccagggatgtgggtccaaggtcgtttgctaagaactaggggcctggtggcagcagggaggggaggtgaccaggcacagacaggccaatggcccaaggcctctgctgaggctggagaccacagatgtggggtgttgttggcctgtggggtgttgctgtcggcctgtgaggtgttatcggcctgtggggtgttatcggcctgcgggttgttatcagcctgtggggtgttgttgtcggcctgtgagttgttatcggcctgtggggtgatgttatcagcctgtggggtgtttttatcagcctgtggggtgttatcggcctgtggggtgttgttggcctgtgggtgttgtcagcctgtggggtgttgtcagcctgtggggtgttatcggcctgtggggtgttattggcctgtggggtgttgttttcggcctgtggggtgttatcggcctgtggggtgttgttattggcctgaggggtgttatcagcctgtggggtgttgttggcctgtgggtgttgttttcggcctgcgggtgttgttttcggcctgtggggtgttatcagcctgtggggtgttattggcctgtcaggtgttatcagcccgtggggtgttgtcggcctgtggggtgttgttgtcggcctgtggggtgttgttgtcggcctgtggagtgttgttattggccagccgggtgtgatttgctccagctgtaggtgtaggttcccagacatgcatatcaggtcaacccaagtctgaggatggcagagttgctgtgagagcagggccaggtggtgaggaggatgctggtgaggtggctgagatgacacatcgaagggttgggctgtgctgggagggagcgaggccaggaagatggtgatagacttggaagagaaaaggggccatgggctgagagaagacaaagggcatgagagggtgagagggaagttgggagttgagtttcaaaggaggaatcaggtcaggggatggcaaaggggtggagtgtagttgtggaaatgaatttctaaagggaaaaatcagtagccagggaggagagagttgagggagcccagtgttgagggctaatattactaatactcactgagtacctactaaatgttaggtacagttccaaattctttttgttgttattgttgtttttgtttttttttgttttctttttttgagacagagtctcgctctgtcacccagtctggagtgcagtggcacaatctttgctcactgcaagctccgcttcccaggttcacgccattctcctgcctcagcctcctaagtagctgggactacaggggcccactaccacgcctggctaattttttgtatttttatagtagagatggggtttcattgtgttaccaggatggtctcaatctcctgacctcgtgatccacctgcctcagcctcccaaagtgctgggattacaggtgtgagccactgcgtctggcctgttgtttttaagacagagtctcgctctgtcacccaggctggagtgcaatagtgcgatcttggctcactgcaacctccacctcccaggctcaagtgattctcctgcctcagcctcccgagcagccgggactacaggcatatgccatcaagcccggctgatatttgtatttttagtagagacaaggtttcaccatgttggtcaggctggtcttgaactcttgccctcaggtgacctccccgtttcagcctcccacagtgctgggattacaggcgtgagccactgcacctggccctctcatccaatttctaagaacaagagtgccctccccactctgtccacaggccatccctgaactctagtcctgacctcagcctctctctgttgcccggggacatcatggcacccatcactcctcagtctcatcccccttccctctttgcagctctcttcctctcccgtctggaagaaaccccttttatccacccggttgtatttgctctgccatcacctattcgcttccactgctgagctcctaagagctgcctccacgtgctgtctgagcttcatcccccaccagctccccatcccccacgggctcctcatccccctccagcttctcatcccccaccgggttccccatcccccacgggttccccatcccccacgggctcctcatcccccacgggttccccatcccccatgggctccccatcccccatgggctcctcatcccccacaggttccccaacccccacaggttcctcatcccccactgggttccccatcccccacgggttcctcatcccccacgggttccccatcccccatgggtttcccatcccccacgggctccccatccccctccagcttctcatcccccacgggttccccatccccaatgggttccccatcccccatgggctcctcgtccccctccagcttctcatcccccacgggttccccatcccccatgggttccccatccccctccagcttctcatcccccacgggttccccaccccccacgggctcctcatcccccaccgggttccccatcccccacgggttccccatcccccacgggctccccatcccccacgggttccccatcccccacgggctccccatccccctccagcttctcatcccccacgggctccccatcccccacgggttccccatcccccacgggctcctcatcccccacgggttccccatcccccacgggttccccatcccccaccagactccccatcccccacgggttccccatcccccaccggactccccatcccccaccggactccccatcccccacgggctccccatcccccaccgggttccccatcccccacgggctccccatcccccacgggttcctcatcccccacgggttccccatcccccaccagactccccatcccccacgggttccccatcccccaccggactccccatcccccaccggactccccatcccccacgggctccccatcccccacgggctcctcaaccccctccggctcctcatcccccacgggttccccatcccccacgggctcctcaaccccctccggctcctcatcccccaccgggttcctcatcccccaccgggttcctcatcccccaggggctccccatcccccacaggctcctcatcccccatgggttcctcatcccccacgagttccccatcccccaccaggttccccatcccccactggttccccatcccccatgggctcctcaaccccctccggctcctcatcccccacgggctcctcatcccccaccggctcctctgaaacctcctgccaagggtaagcatgaccagcattgccgatagttccatatttcatccttatcttgcttgacctatgccggacacggcactgtcagccactccctccttctttcccatcttgtgcttcccagatgctgcccctcccaccctctcccactcctcctcaggctcccttgcagccttcttctccccagcacccctttatttatgagtcagtgttccccacagtcctgtctgtggacctttcctctttccatctgcccctggatggcctcaattgcatccccgtgtgacgactcctgcatgctgggaccggtttatccaagtccagctacatactcatggcaccccgcacctctgcccaaatacaagtccaaacactgcacggccctcttcctgagtcccagctggaggaagggcacctccactcatccagcacccaagctgggaacctgggaatcattcgagtcacgttcctcccagcacccaagccgggaaccccggaatcgtctgaatcatgttcctcccagcacccaagccgggaacctgggaactgttcaagtcctgttcctcccccatactccatctcatctttcaccaaaacccatggattctatcttcagaacttctcaaacctgaactcttttccaattctctacttccttccagtctttgaaactgtctgctctcaatctccaccccgtactctacacagtagtcagagaacattcctaaaatgcaaatctgatcctgtcccaattaatatccttcactggctccctgttcctgcaggacaaaatcccgactcccttatgtgacagtcagggccctttttgttgttttgttttgagatggagtttcgctctgttgcccaggctggagtgcaatggcgtgatctcagctcactgcagcctccgcctcccaggctcaagtgatcctcctgcttcagcctcccgagtagctgaagctacagacacatgccaccacgcccggctaatttttgtattttttgtagaggtgggattttgccatgtttcccaggctggtcttgaactcctgacctcaagcaatctgcccaccttggcctcccaaagtgctgacattacaggcgtgagccactgctcctggccgagggtccttgttgatctggcgttttccccctccccagttgcttcttgtaccacgcccacatcatggtctgtgctctgcccccatctcttcgtctgtaaaatggactaatcgcaatccctgcctcactggagtgttaggaaggtgatatggcttggctgtgtccccacccaaatctcaccttgaattgtaggccccataatcccctcgtgtcctgggagggacccggtggaggtcattgaatcatgggggtggttacccccacgctgctgctctcgcgataatgagtgagttctcgcgagatctgatggatttttttttttttttctgagccagagtttcgttgttgtggcccaggctggagggcagtggcacagtcttggctcactgcaacctccacctcccgggttccagcgattctcctgcctcaacctcccaagtagctggaattacaggcaggtgccaccatgccccgctcatttttttgtatttagtagagacggggtttcaccatgttggtcaggctggtctcgaactcctgacctcaggtaatccactcacctcagccatgcaatggtgtgatctcggctcactgcaacttccgcctcccgggttcaagtaattctcctgcttcagcctcctgagtagcggggattacaggcacccgccaccgcgcccagctaatttttgtatttttagtggagacagggttttgccatgttggccaggctggtcttaaactcccgacttcaggtgatccacctgcctcggcctcccaaactgctgggattacaggcgtgagccaccgcgcctaccaatctgatggttttataaggggcttccccgttttgttcggcacttttcctttctgccgccatgtggtgaaggacgtgtttaccgccccttccgccatgattgtaagtttcctgagcctctctggccatgctgaactgtgagtcagttaaacctctttcctctatgaattaccgagtctagggcatgcctttattagcggtgtgagaacggcctaccacagaggatgaattgttctaacaggtggcagaatttggcatcatacctagcacgagatacacgttcaaagagtgccagcgttgtttattctcctggcagagctggaggaatcttggtgggcttcacagaggaggtggccttggagccaccccttgaaggatggagggatttggacatatggtgctttggagaaacagccagaataaagccctgtggaggttgatactcgaacctcaagcaactcagactggctgggcccagtggttgtggaagaaaatagtggaggataaaacaggaaatgtaggccaggcgcggtggctgggatcacctgaggtcgggagttcaagaccagcctgaccaacatgatgaaaccccatctctactaaaaatataaaatcagccaggcgtggtggatgcctgtaatcccagctacttgggaggctgaggcaggagaaatgcttgaacccggcaggcggaggttgcagtgagccgagatctcgccattgcactacagcctgggcaacaagagcaaaactccatctcaaaaacaaaacaaaacaaaacaaaacaaacaaacaaaaaaacaggaaatgtaagctggcctgcatttggacttcgttctgtggaagacgctgagcagctgggatggcctcagccaccatcatctcactgaacctttgcaacagctcccgactcacctccctgcctcccctctgttccccacactgcagacagaagggtgttttggaaatccgtatccagtcctatcattcgggactcacgtcctacactgggccccgctgctcatggtataaggaccaccctccttctggtgctgctcgagccctgcctggcctagccctgcccacctctgtgcctccccatcctccctccatcagccccagcaacgctgacctccgtccagtccctcctacctcctcagtcagcgactgttttttgaacatctacacatttgccatgcagcaccttcgcacatggctgttatctctgcctgggatactccttcctttggaaacaaacaatctaattcttgctcatccttcacatctcaactcaaatgtccttcctccaggaagtcttccctgattctcccctttcacgagttctcctggtatcaagtgcctctcctttgtcatgccacccaccacagttgcatttttacctttcttcgtgtgatcacaaaggaggccagtgggccagaagttctgtgggcacaggagccgggatgctcctccgcgctgctgcgtcctggggtctcacacagggcctgttacaaatacagacagtgtgaatcgggggcgtggggagagggtgaagaagaacagagactggtgctggggagatctttgagaggaaagaggccgggcacagtgactcacacctgtactcccagcactttgggaggccaatgtgggcagatcatgaggtcaggagatcgagaccagcctggccaacatggtgaaactgtctctactaaaaatacaaaaattagccgggcgtagtggcggtcacctgtagtcccagctacttgggaggctggggtaggagagtggcttgaacccgggaggtggagcttgcagtgaaccgagattgcgccactgcactccagcctgggcgacagagcaagactctgtctcaaaaaaaaaaaaaaaaaaaagatagtggtgatgctcctgctttgtaacagagggcagaggagccgtcacggagagggaggagcggagctcaggctacggcaaggaggaggaggagaggtacaaggcgtgggttgggtttgatgatgtcacgagttgagtttgatgatgtcgtgggttgggtttgatgatgtcgtgggttgagtttgatgatgtcgtgggttgtgcttgatgatgtcgcaggttgggtttgatgatgtcacgagttgagtttgatgatgtcgtgggttgggtttgatgatgtcgtgggttgagtttgatgatgtcgtgggttgtgtttgatgatgtcgcaggttgggtttgatgatgtcatgggctgggtttgatgatgtcatgagttgagtttgatgttgtgggttgagtttgatgatgtcacaggttgaatttgatgatgtcacgctgtcccagacggagcttggaatggaagtgcagggctgggtgcaggctggtcagaattttgagcagtgaagagaacaggaccccaagagggcacctgcagagagagaacacagagagggaggggcacagctctgacactcagtttcttcctcagggaggtggggctgcattgccaacctcctagggtgattctgaggctaaaggaggtaatctaggtacagtccttagcaagctgcctggcatgaagtaaaatcatcatcatcgtcttcttctttgtcatcatcttcatcacacttaactgcatttccatgttgaactcaggagcctcaaataatcagaaaataaagtaaccaaggacttctctgaggccctgaaatcagccacaccatcagaggactcctgcgtgtgcctgttctagggagggagggacacaggacccttagagatgcttgggctccacctcctaccaagtcatcccgggaccctcctaggaccctctctgtccccaccctcatccgttttagccgttgaactaggttcaggaagaacagagctcaccgaggagtgatacataaaacaaggcccccgtgaagccacatgactccacccagtcctggtctccccaggcaaccacgaggccattcattcttttgtgtgatccgggaagtgggcttgattgaacgaggatgtggttcttgggtgggaaatggaggctgtgaagacagtgtctttttttttttttttttttgaggcagtctcactgtgtcaccaggctggagtgcaatggcgcaatcttggctcactgcaacctccacctctggggttcaagcaattctcctgcatcagcctcctgagtagctgggactacaggtgcacaccaccatgcccagctaatttttgtattttattagagacggggtttcaccgtattggccaaactggtctcaaactcttttttttttttttgagacggagtcttgctgtctcccaggctagggtgcagtggcacaatcttggctcactgcaacctccacctcctgggttcaagcgattctcctgcgtcagcctcctgagtagctgggattataggggtgcaccaccacgcccagctaatttttgtatttttagtagagatggggtttcaccatgttggtcaggctggtcgcaaactcctggcctcatgatctgcccgcctcagcctctccaagtgctgggattacaggcatgagccgctgcgcccggctgacaatgtctctttttatggaggcaggggtggggggtgcttacagaggagaggaggccagcgtgtcaggctgtaggaagagcccaggggctgtcttgggatcccaaagccgctgcagaattgaggcttgcgctggggtccgggggcacctggcctgtctgttcttgccagttggcctggacctggtccaccttctcaggccctcggtctctagcctgccaccgccacctcctccaccgccctgagaagaagtgccaggctttgctgggttctgctcccagctgtccccagctggtgagggacaggcgtggttaggggtctgcacaagaggccctggccacttctccggggacagccctcttcctctcccctagagtgtgggctgccatggggacgggatgtgtctggaggcccaggctcagggccaccccagggctgcctgctgaggcccatgaagctgacccacagccttcccggttcccggggtctctctgtgctctctccgcagtctcgaagcagcatgcaacagggcaacgtggacggcgcccggaggctgggccgcctggctcggctgctcagcattaccctcatcatcatgggcatcgtcattatcatggtggccgtgaccgtcaacttcacaggtgagacccagctccttggagaggaggaagccagcttgcctggtgtgaggactgctcaagggtgtacccagcctcaggggcagaggtggtgggttgggggaaggagaagggctggtgggggccccggccttatcctcccagtccataaagtgccccagttcccaggagggaccagatgagtggggatgggctggcagacttgtcttatgcccagagagtgaactgatggaaagggtgtggaaagtgcacagcctcggagtcagaggacaggagctccagcttcagctctgatgggcctgggaccagggtcggttcctgactagctgagcctcagtgtttcctggtatcaagtggcaggaaagagcctccagcagaggcttttgtgagcatcacccgagataaaggacgtgactgtgctttgtaaacactaaaatccctgcagtcagccggggaaccccagaagcaagcagtgcatatggtagaattcaaaaagtaggtgacccttctgtgggcacccataggtggcccggtgaagtcatccaaccaggggaaacattttttattattttgtattaattaactttatttttgagatggagtttcactcttgttgcccaggctggagtgcagtggtgcgatctcggctcactgcaacctccgccttccgggttcaagtgattctcctgcctcagcctcctgagtagctgggattacaggcaccagccaccacgcccgactaatttttgtatttttagtagagacggtttcatcatgttggccaggttggtctcgaactcctgacctcaggttatccacccaccttggccgcctaaaatgctgggatgacaggtgtgagccgccacgcccagcccaggggaaccattttctctttctttttttttttttgagatggagtctcattctgttgcccaggctggactgcagtggcatgatctcagctcactgcaacctccacctcccaggttcaagtgattctcctgtctcagcctctcgagtagctgggcttacaggtgcccaccaccgcacccagctgattttgtatttttagtagagatggggtttcatcatatcagtcaggctggtctcaaactcctgacttcaggtgatcctcccgcctcagcctcccaaagtgctgggattacaggcgcctgccaccacgcccggctaagtttgtatttttagtagagatggggttgcatcacgttggccaggctggtctcgaactcccgacctcaggtgatccaccagcctcggcctcctaaagtgctgggatgacaggcatgagccaccgcgcctggcccaggggaaccattttcaaaggtgactctctgctgttcaagaaacccatgcagcttggtgaggtgactttggggggtcatccgggtctgaactgccgattttcttcctttcatacacgtacatcaggaagtccccaaggatctctgcccatttcaatgaaccctaagcttttcccctaaagacctcgctgctcaaactgtgctccctggacctgtgacgggattatcgaggaatgtgtcagaaacgcagaactccaggctccatccctgaaccggattggaatctggactttaataagactcccagcccaaccgtcaacgttgggaggcactggtctagagtgtggggtgcccaacttgagcttgggaccgaaagcctggggttcagctgtggggccgccagcaaccttggccacttaggagagggaagcgttcgggtttggaatcagcgtgcccagcttcagaatccaggtcccacactttctcactgtgtgaattggagcgtgtgtgacagtttcctccatgagtgagtctgattgacatgcaggtacatgcaaggcaggagcccaccagcccaggacattagcctccgtctcaccaaatgacgccttggtctccatcctgctgctgcttgttattttagccaggacttttttttttttttttttttttttttccccagacagagtcttgctctgtcgcccaggctagagtgcaatggcacaatctcggctcactgcaacctctgtctcccaggttcaagcgaatctcctgcctcagcctcctgagtagctgggaatacaggcacgtgccaccacgcccggttaatttttgttatttgtagtagcgatagggtttcaccacgttggtcaggctggcctcgaactcctgacctcaggtgatctgcccgcctctgcctcccaaagtgctgggatgacaggcgtgagctgccgcagccgaccagagtggtgcacattttaatcagtccagtaactaagcagggaaagaagtctcaacagttagatagcaaaagtctcaggactgattcagattggctcagctagggttgcatgcccacctctgacccagtgccacctgagccagtcactgaggccacagtcctcttactggcaggagttcagttactccaagagctccaaaccaaagaggttcccaagccttagccttctccccttatccctattaccacttcccactgggaaccagaaacccaaatcctccagtcagggacttgaagagccagtgttctgagccctgttctgccatatctgttttttttctttacagttcagaagaaataaacttaagcagggagctgggctagcagaggccggccctggccatcgggagagctctgacctgcacaccgcgggaggccagggtgctgactgtcaagcatcccctgtccccaagttccaaaagcacagactcaaagggaaaccccccagtcacccactgtcagcccccatctgacaagaaagcctggagcgaggaaggaaagcacagcgaacccaatgggtaacgtggtttactctcccggacgcgtcctgggatctcaaccccagcagtctggcttgtttctcattcccacaatttcctgggttccaccaagcagcgaaaactgccaggatgaatgaggaaaaaacccagccccacaaacgagacacacgctggcggggagagacgcagcagagctccttcctgtctgtggactcggagcaaagacgtggggccccatcttttgtgttttcctcaagcggggaaagaatggactgtttgcatgcttcgtgccacacgcccgcggtgatcccagccagggccccgagcgcagaggcggagctgtgctcagcacaggcctgggacctcccccggcaggcacctgtggggggtgcagctcccgggaaggaggcaactgcctcacttaacatcctccgctgcaaggtggtggcgccgagaggcgtgtctgtgaagacaggtaccaggatggcaggacccgcacgcctcttcccacacctgtcagcttcggaagcatctctcgaggactctggtcccaggatgtctcccaggacaagccagtctgcctcttcctcctacttctgctgtagcctgggaccagacctggccaaggtcagccagcggggagggccgaggtctgagctctcgtcctgccgtggcccccgcgatggcctggggtgcaagcttggggctccgtctggtgctgcttaggtagtttcaggcttccagcccagccctatgctctgtgcttggccctgggcccctggccatccacaaacagcagaggccttccctggaggaggctttgggaccacccctggggggacttcccaaagggtcccaggctgtcaggggcgtttgcgccacctgcaagggcgtgggtcagagagtttttatgggggtctgttgtttgaccgtcctgagaccgagggaagggctcagctgaaggaccccgtctgcaggagagtcgggggaccaggtttgggaatacacttgcatgtacagagcctggggcctggacgccacggcctctcatcttaggacctaatgggacccccgaaaggagccaagtggggccctcggcctcttccttcgttccaggcccatgattttccctacacttctccctggcccaggctccagccacaggcacctctcctgcccccgcccaccctcctgaccgcagctcccaggccctggagacctccaggctttcctgccctgggcagccccacctcacagccagagtcaatgccttcatgggaagggctcccagccacacccagagtggcccaaagctgttgaagtcagcatcctttgtcccatcaggaccctcctgcctcctctccaggcccttgttcgcctccccaccctcctcagaggcccggggaagggaagagcaggtcagtacagaggttctgtctacagggaggggccctgggtctatgcacagctggagctctgagccttccacagcccgtgtgactgctagagggcaggggtgcagggctcagggggcccgggctggtcctttggggctggtgttcctacgtcagtccccacctggggaataaactccagcctctcctgctcatacagaagggactggttgggtttgctttatgggatctttgagaccaaaacagatgctcctgtttgctgggggagggtgtgagcacggagtatttctgtccctcgtgaagtcacgtcacacaggggagaggcgaggtcgatggaactggccacgcacaggctctggctctggaaggagggatgatgagtgggcgttttcccggcaggcccccggggtcctcagcctcagcaacccagggagaggacagaaacgaaccgatggttgagggattgtcacgggaggaacatgacacccgaagggactctaggtgccctcggagtgccacacatgcccagaccttctcacacccacacaaataggctctgccgtgcactcctacacacacacacacacacacacacgcttgttcacactcagaacccaggacagccacagccaccgcttaggggaagccactgcagatgcccctggaatgggcacagcacagccagggcgctcttccaggcaggcgaggataacttgagagtttcctagggcaccagggacagagctcagaggcccccgaggtgtgtgtaggaggcggaggcccgcagagcacagagcaggagaagggcttgggccctggaggagaaagccattctggacaccaggggacctggacggagggtccccacagcccgtgccccacgccgcctggaggccagaggggtcagtggccctgctgtcccggctccatcttggttctagccgccacctgcatgaacacagtggcccggcttaacgcactaacccagcctctccctgtgtcccacagggagtagcaagacccaccccacactgccttcaccatctacaccagtgacgccgctgtgtgtcttagcatggaaataaataaacctgaatgtacgtgctcgcctctggcctgtgtgtttgtgctgctggggtcaagggggttccaaacaatccgggggtgagcagtccactccgcctgtggccccagggtcaggctgaggctgcgcactgggaacctggcacatcggggctccgtggccaactcaaggcgttcctctgggcaagtcacttgtccactccgggactcagtttgtccaactgtaaaataagtggtaatgccagtctcatctcccttcagtcctttctgcatagatctcaggcctggagagaagagggcaggcaagagttcgagaccagcctgcaacatgaggagactctgtctctagaaaacatttaaaaatcagccaggcgtggtgctgcacgcctgaggtcccagctactcaggaagctgaggtgggaagatcacttgagtcagagaagttggagctgcagtgagctgagccatgttcctgctcctggctcccagacctcctgggacagtccctagaccaccaggttccccaccctgctggcctcactactgggacactcactgccacccccaacaaccaactctctgccttcctagagcgttttctttaggtcggagtcacatggtccaggaagcctgccctaagtgtctgcgtccccagggttcagtacagagcctggcacgtagcaggtgctgaggacaagtctgtagaaggagggagggaggggccccagcaaccaggagcctcccaggttgcaggatccctgtgagcggaagctccttccatccagactggaggccacggcgccgcttcctgtgtgccaggcgcggggctccctgctccgctggaattacctcatttaatcctcacaacacttccacgagggatcctcccattttcctgggaagaaataaaactcaggcgatccaggggcttagccaaggtcatacagtcaggagccagtagagcaggacagtccttgagaagcgtgcctcggtgacaggggcctctccagaccataaaagcctgcgggctctgccaagggagctgactgtttccacaccctgtaactgctcccagcactttgggaggctgaggcgggcggatcacctgaggccaccagtttgagaccagcctgaccaatatgttgaagctgacaagcttcaaaacgaacattgattgaactgaaaaatatgatgtacatgtgtccttacacacttttgttttgttttgttttttgagacagagtttcgctctcgttgtccaggctggagtgcagtggcgtgatctcggctcactgcaacctctgccttcccaggttcaagcgattctcctgcctcagcctcccaagtagctgggattataggtgcccgccaccacaccggctaatttttgtcattttagagatggggtttcaccatattggccaggctggtctcaaactcctgacctcaggtggtccacctgcctcggcctcccaaagtgctgggattacaggcatgagccacggcgcccagccacctggaggtgattattaaggtgaaatgccaccagtgtaacgtcagcaacagccacactcaggtgagccggacccttctacacaccctctgtcagcgacagccaggcccctttacagcaggcatcgggggcctgaaagtccacgccccttcacagcaggcatcggggcctggcatcggggcctggaagtttctttgggatcatttgtcggacaccaatttcagaagtttaaaagcaggttgggaggagggcacgtgttttgcaatcagtaaacgaggaaaggggggtctcaccgtgcggaggcttcgatgacagacgtgcttctgggacccggggctctggcgccctgtcggtaaacaggtccatgatctctgcaggcccatgggctgtgggaggcccgacagagagctggacacacagaaggccgcgtcctggggctcagcaggcagctcctcccatcccacaatctgggaggctctgggcaccccaggctgaccgcgacattctgatctcctccagccccaggcctacctcgcctccttcccgttccttgatgcaaaagaggagacggccccctgtgtccaggaaccaggagcacctggccccgtcccaggcctttcaggcattggctgtgtgacctccggcagcccacggcctccctctgaacctcagtctccctgtgtaaaggagggactcagtctggagcaggcttttcaggcctggccacactggaatcacctgagatgtttaaaaaatcctactaccggccaggcacagtggctcacacctgcaatgccagcactttgggaggccgaggcgagcggatggtcaggggttcgagattagcctggccaacatggcaaaaccccgtcttctactaaaaatacaaaaattagccgggcatggtggagggtacctgtaatcccagctacttgggaggctgaggcaggagaatcacttgaattcaggaggtggaggttgcagtgagctgagatcgcaccattatactccagcctgagcgacacagtgagactctgtctcaaaaaaaaaaaatattctactacctgggtgccactgctagtgaatctggcttaattggtctgggtgcagcttgcacaccagagttttaaaagccttccaggtgatcccaatggacactcaagcctgggccccaccggtctggactctagaggcttttgctactcaaagtgtggtccccggaccatcagcatgggcatcacctggagctgtcagaaagctcaggccataccctagccttatcaatcagaatcagccctttaacaggatcctcaggtgctttgtatgcaatttaaagttggaccaggccagaagagtcgctagccctgtaatcccagcactttgggaggctgaggcgggcagatcacgaggtcaggagttcgaaaccagcctggccaatatggtgaaaccccatctctactaaaaatacaaaaattagccaggcatggtggcaggcgcctgtaatcccagctactcaggaggctgaggcaggagaatcacttgaacccgggaggcagaggttgcagtgagctgagatcgcaccattgcactccagcctgggtgacagagcaagagtctgtctcaaaaatgaaagaaagaaagaaggaaagaaagttggaccagctctgatcagatgcctgaggcagcttccactctcagcgttccttggggccggccggctttcctgcagtcccagaaaggcagagccacggagctgagaggcacttacaggcttgaaacctgccagtggggcctttatctcacctctaaaagaataatcctccatccctctgtctccctccctctcttcctttctttcttcatcctagaatttattgtaacaaactgagaacatctaggcaatactgagaaaccaagagaaggataagagaaaccccagataagtgtggaagggggtctcacagcagaagaggccggcacccacatccagcgtggtcacagtgaggctgtggcccaggtggagaagaccacctttgtgtgggggggaggaagttggaagggcagggtgggcgtggcccaaaagtgcaattctgggggatgttggaccttctagaaccttcccagggttgaaggagagccaagtgggtgtctcagagctgcttggatggaaacttctactcacaaccaaaatcaacaccctgggttctccctggtctccatccccagactctaggcctggaggaagcaggagggggcagggaccctgggaagctgtgaggcctcttgcacccctgtcctggggcaggaattcctgctcccggagttggcccaggttcatatgctgcctttgtgctgactgcaaagtgggccctcctatacagacaaaaacatgaaaactgcaaacgcctccccttcctgggatgtttgcggctggacgcccagcctggtgtgctgagggtagttggatttcagaggtcctgggcactgcctgagcagggcacagtctgcgaggccgtcctgggcagacctgcccgctacgccttgttggggtcctttcccggaggtggcagcacagccggtcagctggaagcggggcagccagggcttctgctcctgcattattgatctgctgcctggtcgtgggtatgaataattaatcagagcgaggaagcacagaagattgcgagccgaggtgcagcccagctcctccccgcctcgcccctcagggttggctcctctttgcttactgtgcttctgtgggggaggctgtacggaatctcaagcttctcctcctgcccacaaggcaggcccaggaaaggccccacagctttggaattgcaacgacccatgtcatcaggatggagctgcctgcagcccctggaccaggctggccatcctcactgtgctcctggccatctgggactcagagtcaggcagccggagttcaaatgctgaatccttaaacatcttttttttttctttttgagaaagagtctcactctatcgccaggctggagtgcagcggtatgatctcagctcactgcaacctctgcctcccaggttcaagcgattcccctgcttcaacctcccgagtagctgggactacaggcttctgcaccacacccggctaattttttttttttgtatttttactagagacggggtttcaccatgttggccaggctggtctcaaactcctaacctcaagtgatccacccgcctcagcctccctaagtgctgggattacaggcctgagccagggtgtccggcccttgaacttctttgcgcctccacctcttcatgggtcgaatggaaacagtgtatcaggtggatcgtgtttatggtgagaagaagccggcctggtcctgactgcagcatgagttccataaacacaagttgatgctgtcgctgatattgtttatagtaaatggcttctttcactgctgccaaggtcttgggaaggggagattggtgggtaactgacgggcctgcttagggtggaggtggtcagaacttcaggggagagggtgcgggccagggtgggtgatgccctatctggggtatctctgggtggggccgccagggaggggtaggagtggaggtaggaagataatcaaaacaattatccagaattactgggcacggtggctcacacctgtcatcccagcactttgggaggccaaggtgggcagatcagaaggtgaagagatggagaccagcctggccaacatggtgaaatgccgtctctactaaaaatacaaaattagccaggcatggtggcgcgtgcctgtaatcccagctactcgggaggctgaggcaggagaatcacttgaatctgggaggcagaggttgcagtgagcagagatcagagattgcaccactgcactccagcctgggcaacagagcagggctctgtctcaattaaaaaaaaaaaaagaaaagaaaagaaagaaagaaaaatgtgactggttgtgaccaattcattgtaaacaccattgcactcggaccaacaggtcccctttaaagagctttccaggagttcctgtccagtgactttgctttatattcttggaccacgactgtgccatacaaccaccactagctgcagaggaggctgggaaattccttcctttcagcggagcacacggatgccccaaggcaaaccgcggttctgttaggaaaagaatggatactgcggagcagccagtgtttcaactagatgtgcactatcaaggtatcagcaaattaagaataaggtatccaggaggctgaggcaggagaatggcatgaacccgggaggcagagcttgcagtgagccgagattgcaccactgcactccaacctgggcgacagagcaagactctgtctcaaaaaaaaaaaagtgtcaagttatagtttgtttactgaatgaacagtcgttgaatgcctactatgtagcagacactgtgctgtgttttgggaacttttagtttagtgcctggagagaataaaaaatggatacatccttacaatatgtgatactgattaggaattgtcctgaaagtatgtgatggagggaatcagggaagctctgcctgaggaagtgacatctccacggagttctgccggagtggtccaggtgtggaaggggtgaaggtgtccagctggagccaggccgatggcaggcgtggggcagggtcaggagggcaagcgctgggctcatcatgcacagggtcagggaggcaccgacttgggaccattcggtgattaatcccttccagcaggtagattaatgacagtggtggggttgatttatttctcatttcctatgataaacaccattaaaagaaggaggccgggcccggtggctcacgcctgtaatcccagcactttgggaggccgaggtgggcagatccagaggccaggacttcaagatcatcctggctaacacggtgaaaccccatctctactaaaaatacaaaacattagtggggcgtagtgctgggcgcctgtagtcacagctactcgggaggctgaggcaggagaatggcgtgaacccgggaggcggggcttgcagtgagctgagatctcgccactgcactccagcctgggcgacagagcgagactccgtctaaaaaaaaaaaaaaagaagaaggaggaggaggaggccaggaatggtggctcatgcctgtaatcccagtgcttttggaggctgaggagggaggatcgcttgggcctgggaggaggaggttgcagtgagccatgattgcaccactgcactccagcctgggcaatggagcaagaccctgtcccaaaaaaagaaaagaaaaaaaagaaaaagaaggggagaaaagtcaaataattagtatctaacttagaaacaagcatggactccaattcagtccagtcatccaagctgttactgaaaactctcacgacagagcgggcatcaggggcgggcacggcaggcaggaaaaggatctcctgcagcctccaggaaggtgtgggtggcaaccgtcagctggacgcacagtggccacctctacaggggacaaggaggcagagtgacacgtctcagccctggagatgccaaaaggggttctctggagaagggctgtgtcatcagacagatcaggaaaacggaatgacatcgagctacacgctgtcatcagacagatcaggaaaacggaatgacatcgagctacacgctgtcatcagacagatcaggaaaacggaatgacatcgagctacacgctgtcatcagacagatcaggaaaacggaatgacatcgagctacacgctgtcatcagacagatcaggaaaacggaatgacatcgagctacacgctgtcatcagacagatcaggaaaacggaatgacatcgagctacacgctgtcatcagacagatcagggaaacggaatgacatcgagctacacgctgtcatcagacagatcaggaaaacggaatgacatcgagctacacgctgtcatcagacagatcaggaaaacggaatgacatcgagctacacgctgtcatcagacagatcaggaaaacggaatgacatcgagctacacgctgtcatcagacagatcaggaaaacggaatgacatcgagctacacgctgtcatcagacagatcaggaaaacggaatgacatcgagctacacgctgtcatcagacagatcaggaaaacggaatgacatcgagctacacgctgtcatcagacagatcagggaaacggaatgacatcgagctacacgctgtcatcagacagatcaggaaaacggaatgacatcgagctacacgctgtcatcagacagatcaggaaaacggaatgacatcgagctacacgctgtcatcagacagatcagggaaacggaatgacatcgagctacacgctgtcatcagacagatcaggaaaacggaatgacatcgagctacacgctgtcatcagacagatcaggaaaacggaatgacatcgagctacacgctgtcatcagacagatcaggaaaacggaatgacatcgagctacacgctgtcatcagacagatcagggaaacggaatgacatcgagctacacgctgtcatcagacagatcaggaaaacggaatgacatcgagctacacgctgtcatcagacagatcagggaaacggaatgacatcgagctacacgctgtcatcagacagatcaggaaaacggaatgacatcgagctacacgctgtcatcagacagatcaggaaaacggaatgacatcgagctacacgctgtcatcagacagatcaggaaaacggaatgacatcgagctacacgctgtcatcagacagatcaggaaaacggaatgacatcgagctacacgctgtcatcagacagatcaggaaaacggaatgacatcgagctacacgctgtcatcagacagatcaggaaaacggaatgacatcgagctacacgctgtcatcagacagatcaggaaaacggaatgacatcgagctacacgctgtcatcagacagatcaggaaaacggaatgacatcgagctacacgctgtcatcagacagatcaggaaaacggaatgacatcgagctacacgctgtcatcagacagatcaggaaaacggaatgacatcgagctacacgctgtcatcagacagatcaggaaaacggaatgacatcgagctacacgctgtcatcagacagatcaggaaaacggaatgacatcgagctacacgctgtcatcagacagatcaggaaaacggaatgacatcgagctacacgctgtcatcagacagatcaggaaaacggaatgacatcgagctacacgctgtcatcagacagatcaggaaaacggaatgacatcgagctacacgctgtcatcagacagatcaggaaaacggaatgacatcgagctacacgctgtcatcagacagatcaggaaaacggaatgacatcgagctacacgctgtcatcagacagatcaggaaaacggaatgacatcgagctacacgctgtcatcagacagatcaggaaaacggaatgacatcgagctacacgctgtcatcagacagatcagggaaacggaatgacatcgagctacacgctgtcatcagacagatcaggaaaacggaatgacatcgagctacacgctgtcatcagacagatcagggaaacggaatgacatcgagctacacgctgtcatcagacagatcaggaaaacggaatgacatcgagctacacgctgtcatcagacagatcaggaaaacggaatgacatcgagctacacgctgtcatcagacagatcaggaaaacggaatgacatcgagctacacgctgtcatcagacagatcaggaaaacggaatgacatcgagctacacgctgtcatcagacagatcagggaaacggaatgacatcgagctacacgctgtcatcagacagatcaggaaaacggaatgacatcgagctacacgctgtcatcagacagatcaggaaaacggaatgacatcgagctacacgctgtcatcagacagatcagggaaacggaatgacatcgagctacacgctgtcatcagacagatcaggaaaacggaatgacatcgagctacacgctgtcatcagacagatcaggaaaacggaatgacatcgagctacacgctgtcatcagacagatcaggaaaacggaatgacatcgagctacacgctgtcatcagacagatcaggaaaacggaatgacatcgagctacacgctgtcatcagacagatcaggaaaacggaatgacatcgagctacacgctgtcatcagacagatcaggaaaacggaatgacatcgagctacacgctgtcatcagacagatcagggaaacggaatgacatcgagctacacgctgtcatcagacagatcaggaaaacggaatgacatcgagctacacgctgtcatcagacagatcaggaaaacggaatgacatcgagctacacgctgtcatcagacagatcaggaaaacggaatgacatcgagctacacgctgtcatcagacagatcagggaaacggaatgacatcgagctacacgctgtcatcagacagatcaggaaaacggaatgacatcgagctacacgctgtcatcagacagatcaggaaaacggaatgacatcgagctacacgctgtcatcagacagatcaggaaaacggaatgacatcgagctacacgctgtcatcagacagatcaggaaaacggaatgacatcgagctacacgctgtcatcagacagatcaggaaaacggaatgacatcgagctacacgctgtcatcagacagatcaggaaaacggaatgacatcgagctacacgctgtcatcagacagatcaggaaaacggaatgacatcgagctacacgctgtcatcagacagatcaggaaaacggaatgacatcgagctacacgctgtcatcagacagatcaggaaaacggaatgacatcgagctacacgctgtcatcagacagatcaggaaaacggaatgacatcgagctacacgctgtcatcagacagatcaggaaaacggaatgacatcgagctacacgctgtcatcagacagatcaggaaaacggaatgacatcgagctacacgctgtcatcagacagatcaggaaaacggaatgacatcgagctacacgctgtcatcagacagtcaggaaaaccgtgaattacgtcgagctaaacggagcatgacagtaagatttctcagagaccttcatacacccacgtgcaccatgtacctccaagaaagggtggattatgcagtatttcctaaattcgatgggttgccaagccccttctttgagaaatattttcttgtaaagctaagttttagatttgcaaacccaagtatttccgttattaaaaactctgtatacaaaaaattatctgtaaacatccttttaagacggctggataatgcatatacatgataacttatttatttacttatcctttctcccattgtgaggcattaaggtgtccagtttctctctctcccatttttttcctgcctataatttttgatgttgttgttttgagatagagtttcacccttgcccaggctggagtgcaatggcgagatcttggctcaccatagcctccgcctcccgggttcgagcgattctcctgcctcagcctcccaagtaggtgggactacaggcatgcaccaccacgcccggctaatttttgtatttttagtagagacggggtttcaccacgttgtccaggctggtcttgaactcctgacctcagatggtccgcccgcctcggcctcccaaagtgctgggattacaggcgtgagccactgtgcccgctccctacctataatttaaacacagggtttaggcactgggggagtgaattctgaaggtgcttcaaaagcagcccttgctgtggaggccccactgggtccacccactcctgagccagggagaagaaggcagcctgggctttgcctcctcactgggtcagctgactgggtcgccatggcaaccacacaggcctggaagagggagggtgctcctgggatggggctagacgtggaagccccagggccaggtggctgggagcctgggacactggggctgaccagaccagatggctgggggaccccctgggaatggggggctaaactgcctttggaaagtgccagatgaacacaggtctcagccagaagcctcagacagagcccctttccttcgtggtaagccatttggaggaccggtggctgtagcgagatatccggtgaagaggcaccacggatgctggaaaatctgggtaatgggattgaacctggatctaataataagcaagtgtgatttgctctcacctgtaaaaccagacccccacagtcttcccagaactcatccatctgttgggggctttgggaagtcccagcctccaatctgctctctgccccagtaggaatgctctcacctccccagtgggaatgctctcacctccccagtgggaatgctctcacctcgccagtgggaatgctctcccctccccagtgggaatgctctcacctccccagtgggaatgttcacctccctagtgggaatgctccctccccagtgggaatgctctcacctctccagtgggaatgctctcacctctccagtgggaatgctctcacctccccagtgggaatgttcccctccccagtgggaatgctctcacctccccagtgggaatgttcccctccccagtgggaatgctctcacctccccagtgggaatgttctcacctccccagtgggaatgttctcacctccccagtgggaatgttcacctccccagtgggaatgttctcacctccccagtgggaatgttctcacctccccagtgggaatgttcacctccctagtgggaatgctccctccccagtgggaatgttcccctccccagtgggaatgctctcacctccccagtgggaatgttctcacctccccagtgggaatgttcacctccccagtgggaatgctctcacctccccagtgggaatgttctcatctccccagtgggaatgctctcacctccgcagtgggaatgttccctagtgcaaagggcagattggaggctgggtcgccagaagcagatgagccctcgttcctgccttcgtatgtgctggtgttttcaaagtttccccacttgtttttcactggatagaggcttttcttccacaaatttctcaatttggtttgaattttatgttcctcaaggaagtggcaagagggtgcccttgtacacagttgactgtcaggggaaggtgtttctgggtgagaggagagcctggtcttcttgggacatttccaggaatgcaggagcaagactatggtgcaaggaccaggtcccagaggcccctgtctgatgttgcaacgcttgccctgactctctagggcaaccatcatccgcaagaactttctgtgctccctggcccatgtcagattcactttgttttttttttccttcctccaagatggagtctagctctgttgcctacgctggggtgcagtggtgcgatcttggctcattgcaacctccgcctcccgggttcaagcaattctcctgcctcagcctcctgagtagctgggataacaggcatcttccaccacgcccggctaatttttgtatttttagtagagacggggtttcaccatgttggccaggatggtctcgaactcctgacctcatggtctgcccacctcggcctcccaaagtgctgggattacaggcatgagctaccgtgcccggccgaggttcactctttaaacttatttaaaacaaaacattatgcttgccctgactctctcgggcaaccatcctccgcaagaattttctgtgctccccagcccatgtgagattcactcttttttttttttttttttttttgagatggagtctcgctctgtcacccaggctggagtgcagtggcacgatcttggctcactgcaaactccgcctcccgggttcatgccattctcctgcctcagcctcccgaatagctgggactacaggcacccaccactatgctcggctaattttttgtatttttagtagagacggggtttcactgtgttagccaggatggtctgatctcctgatgtcgtgatccaccagcctcagcctcccaaagtgctggatacaggcgtgaagagattcactctttaaacttatttaaaacaaaacagaaaccccatctaagttctctgcaccaaactgataccagccgtcgctcatggctgggggagtcgctatgggactggaggtgagaaaggcagtctccagtttttatcccatataccttgtttcgttggaaccttacaccaagcatttatagatgtattacctttatcatttataatttaattgaaaaaataggaatgtctgagggagaacagatgattccctgtaatccattagctgaagcaatcaatgtgaagagctgaacatttttcttccgggcttttaaaaagaaatttgtgacatacagctatagtcgctttataataaaagggctctagtaagtggcctttgcatggtagctggacttcgaggggcttttaagtagcagatcccttctatctcccacaaacctgcctccttaagatgcatcagcctcacctgactgaaatgacaccaaaacaccaggcggcctgagctgctggaggggctggaagccctgagaagctccctctccccggccgggcacggtggctcacgcctgtaatcccagcactttgagaggccgaggcgggcggatcatgaggtcaagaaatcaagaccatcctggccaacatggtgaaaccccgtctctactaaaaatataaatattagctgggtgtggtggcacacgcctgtagtcccagctattcgggaggctgagacagggggatcgcttgaacccgggaggtggaggttgcagtgagccgagatcgcgccattgcactccagcctggtgacagagtgagactccatctcaaaaaaaaaaagcttcctctccctccaggacagagctctccagaaaagcctctcccccgctgccctccccaggctcccgtcttcctgacctttgctttggatctggttcttgctcttggccctcgccctggagctggatgctttggtcgggctcttgcctccagcgtctcctttgctatcagcctgccctcccattgccccagttggaggcagggctgccagctccagcctggccagtggggaaaatggatgcgtctacctcctggttccctgctgaggtcagaggccctttccgacctcctaagccactcagggggcccgtggctgtacaggatatccagtgaacaggcaccacggatgctggaaaatccaggtaatgggattgaacccggatctaagaacgggccagtgtgatttgctctcacccttaaaaccagaccccacagtcttcccagaactcatccacctgttgggtctttgggaagtcccagggcactgaggtctcagggtacagaggtcccaggcttggctccctctggttgttagcccgtgcagacattccagggtctacagacgctccctggagaggggaacacgaggttccaggcagggcccggctgccctcccaggggaaccgagctggaggaactcatgttttcatcatggcccgtgggagccactcatgggctgcttaaacaggcaggaggtaaacacacaccccaggcgaccaagatcagcggctccctgcacagcgggtttaattataagagcaacataatagcgacaggacagaaagggggggaaatggcagggaaaacctctcaccagcccacagcctccacattcccactgcctggctgtgaaccttctccctcctgggtgactttgcccaggggtgtggagtgggttttttcctttcttaatttcattccaattgcaaaattaatacaacgtcattgcagcaaacttggaaaatgcgaaaagcctgaagaagaaaacaacaatttctctaagtgggttttttttttttttttgagacggagtctggctctgtcacccaggctggagcgcagtggcgcgatcctggctcactgcaacctccacctcccgggttcaagtgattctcctgccttagcctcccaagtagctggaattacaggcactcaccactgggcccggctaatgtttatatttttagtagagatggggtttcaccatgttggccaggctggtctcgaactcctggcctcaagtgatccaccctcctcggcctcccaaagtgctgggattacaggcgtgagccgccgcgcccggcccctggggttggtttgtgcagaagcgagaacctgctcaggagcttgcagctggtaagagtggaattagaatgggaaccagatataataataaaagcttcatcttttagaaaaagatcaaatcagaaatatgggttacatttgtaaaaggctttcaattaaaaagaggctgtgaagcacatcttgggaggcctaaaagtccttttcatttggatattgttttatcaaaagccctagtttgtgctgataagaaaatggatttcacaagattgaatctaacaaaaagctttggctagctgattaattaggtgagtcacaggtctcctgggagttcaaagtcaggagtttaaagaccctatgaaaacacataggaagccgggcttggtggctcatgcctgtaatcccaacactttgggaggccaaaaagggtggatcatgaggtcaggagttcgagaccaccctggccaacatagtgaaaccctgtctctactaaaaatataaaattagccaggcatggtggtgggcacctgtaattccagttactcaggaggctgaggcaggaaaatcgctggaacccgggaggcggaggttgcaatgagccgagatcgccccactgcactccagcctgggcaaaaagagtgaaactccattaaaaaaaaaagaaagaaagaaagaaaaaagaaaaatgtagtaatagttcaccaatctctccatcacttcagataaactgggccaggcacagtggctcacacctgtaatcccagaactttgggaggccgaggcaggaggatcacttgagcctcagagtttgagaccagcctggggaacccagggagatcccttctctacaaaaaaatgcaaaaaaatatgagccaagcatagtggtgcataccgtagtcccagctacttaggagtctgaggagggagattcatttgagtccaggagttggaggctgcagtgagccgtgattgcgccactgcactccagcctgggtgacagagcaagaccctgtctcaaaaaatacataaaaacattaaaagaataaaaaataaagttcagacaggctaggcacagatgaattaaatccacagtaagtactgtatttttattttcaccaaaaatgtcaatcttatcctcagtgctaattttctgggggaaaaccacgagctacgctgttctactctcagaagctccattttgctcacattcagctctttctcttttttttttttttttttttttgagacagattctcactctgttgcccaggctgcagtgcagtggcgcgatcactgctcactgcaacctccgcctcccgggttcaagcgattctcctgtctcagcctcccaagtagctgggattacaggtgcccaccaccacacccagctaatttttgtatttttagtagagacagggtttcaccatattgtacaagctggtctcgaactcctcttgacctcaggtgatccacctcccttggcctcccaaagtgctgggattacaggcatgagccactgcgcctggcctcagctcacatttattgaacatctactatgtgccacttactttcacatacatttcatttgacccatgacaacctattttatttatgtatttatttattgaaatggagtttcgcttttcttggccaggctggagtgccacgggtcgatctaggctcactgcaacccccacctcccagagtcaagtgattctcctgcctcagcctcccaagtagctgggattacaggcatgagccaccacgccccgctaatttcttgtatttttagtatagacggggtttcgccaggttggtcaggctggtctcgaactcccgacctcagctgattggcccgcctcggcctcccaaagtgctgggattataggcatgagccgcctcgcccagcccaccttttggctattgtaaatataatactgctgtgaacatgggcttgcaaagatctttttgagatcccgctttcaattcttctgggcatatacccagaagcggaactgctggatcacatggtaattctatttttaactttttgaggacttgccttactgttttccatagtgactgcactattgtgcattccaaccgacggtgcacaggggttctagtgcctcagcatcctcaccagcacttatttatttatttatttatttatttatttatttatttatttattgagatggagtcccactctgtcgcccaggctggagtgcagtggtgcaatctcagctcactgcaacctcctcctccccagattcaagtgattcccctgcctcagcctcccgagtagttggcattacagccgtccgccacgacgcctggctgatttttgtacctttagtagagacggggtctcaccatgttggccaggctggtcttgaactcctgacctctagtgatccgcctgctttggcctcccaaagtgctgggattataggcgtgagccaccgcgcccagccaatactttttttttttggagacacgatcttgctctgtttcttgggctggagggcagtggcgtgatcacgggtcactgcagcctcgacctcctgggctcaagcaatcctcccacctcagccctctgagtcgctgggaccacaggcacatgccaccacacctgactaattttttattatttgtagagatgtagagccttctgtttcccaggctcaagttcctgggctcaaatgatctgcccacattggcctctcaaagtgccaggattacaggtgtgagccaccatgcctggcctctggtttgttgtttgttttttgagatggaatctcgctctgttgcccaggctggagtgcagtggcgctatcttggctcactgcaactccgcctcccaggttcacgccattctcctgcctcagcctcccgagtagctaggctacaggtgcccaccaccatgcccagctaattttttgtagttttagtagagacagggtttcaccatgttagccagggaggtctcaatttcctgacctcgtgatccacccacctcggcctctcaaagtgctgggattacaggtgtgagccaccgcacctggcctctgttttgttttttgatggtagccattctaacgggtatgagttataagcctacagttttatatcctcctgattgtccccaataacagggaggataaaaatggaatgaacatacggacactgatcagacaggcatcaggacctgccagtaaaagacactgaaatattggcaagaccaaaataaatggagagaaatatcaagacatgaactcaagattcaatattgtaaagatgttcattctcctccagttgatctatatatttagtgtaacgccaatcaaaatccagcaagtttttcttggaagctgacaaagtgattccacaatttatataaaaatgcaaaggaccagccaggctcagtggctcactcctgtaagcccagcactttggaaggcagaggtgggaggatcacctgaggtcaggagttccagaccagcctggccaagatggtgaatccccgactctactgaaaacacaaaaattagccagacatggtggtgcatgcccctaatcccagctactcaggaggctgaggcaggagaattgcttgaacccgggaggtggaggttgcagtgagccgagatcacaccactgcactccagcctgggtgacagagcgagactctgtctcggaaaagaaaaaaaaaatgcaaaggatcaagaatagccaagataactttgaggataaagaacaaatccgcaggacctattaccagatatcaggacttattgtaaagttatagtaattaaaacagagtggtgttttctccaggacagaaaaatagaccaatggagggctgggggcagtggctcacgcctgtaatcccagctacttgggaggctgacgcaggagaatggtgtaaacccgggagacggagcttgcagtgagccgagatcacaccactgcactccagcctgggcgacagagcgagactccgtctcaaaaaaaaaaagaaaagaaaaatagaccaatggaaaagaatgagaaatccagaaggagactcgggacaactgcttcgttcatgacaaaattggtgcgtcagtacagtaaagaaaggatgaggctaggcgcagtggctcacgcctgtaatcccagcactttgggaggctgaggcgggcggatcggctgaggtcaggggtttgagaccagcctggccaacatagtgaaaccgtgtctctactaaaaatacaaaaattagctgggcatgatggcacacgtctgtagtcccagccactagggaggctgaggcaggagaatcgcttgaacctgggaggcggaggttgcagtgagccaagattacaccattgctctccagcctggggggacaagagcgagactttgtctaaaaaaaaaaaaaaaaaaaaaaaaaaaggatgaccttctcatatggtgctggatcaattgcatatccatatggaaaaatgaatcttgacccctgcctcaaattatacatcataattagttgcagaatatttatagttctaaattgaaaagcaaaataatacagcttctagaaaaaaaacgccggagactatcttcatggcactgggcgcaggcaaagtttccttaacaggatacaaaacactacccacaaaggaaaaacatggatacattgggttacattaaaattcataacctctatttatcaaaaccaccattaagaaagtagaatgataaaggccggttgcggtggctcacgcctgtaatcccagcactttgggaggccaaggcgggcagatcacctgaggtcaggaatttgagaccagcctggccaacatggtgaaaccctgtctctactaaaatacaaaaattagctgggcttggtggtgggtgcctgtaatcccagctgctcaggaggctgaggcaggagaatcgcttgaacccaggaggcggaggttgcacggagctgagattgtgccactgcgctccagcctgggtgacagagcgagactccgtctcaaaaaagagagagagagagagagagcaagaatggccaacagagaacagaatagtggttctccacatttggcgtgcatcagaaccgctgggaggctggttaaaatgatggctgggttccagggttccacctgtgtgtccacacagaacatagcttacatgtcccccacttagcttcttttatcatagttaaagatgtgaaagacctctggaatgttctctcctctcccacatcagcgagggggaacaaaagaggcccagtttctggctattaggacaaacccaaggatctctcttatgtcaggtcagctgcaccctgactttgctgatatacttacgagcatttcctcacataaccctgacaatataattagagcataatcatggtgaccatccttatcgccactttacagaggaggaattgaccaccagctggattaattgcaaagtcacgctgctgtgctaaagcagaaatgacgttcaagccctcatctctgactctgggtctgatgctccctcctccatagccagctgcctcccacaatgtcaggcgtgctgttccctcctctctacccatccaggagctaccaaactccaggtccaagaccagcctgaccaacacagcaaaaccccgtctctactaaaaataccaaaaaaattgccaggcgtggtgacagatgcctgtaatcccagtataactatagtagacgtccgagggcccctttctccaggaagcaaatattgtcacccaaagctagatgtttttgcctgatgtgaatattctattgtttagctacgtgatgtgcttctggatgttaaaagctcagctctgaacggactcctttaggcatcaactgtttctgtggctaattggctgtctggggaggtacatgcagcagcagcagcagtaataaaatactgatctttcagccaagccacttagaaagagccgggataccccgttcctccatgaatcagcttttttttttttctttgagatggagtcttgctctttcgcccaggctgaagtgcaatggtgcgatctcgctcactgcaagctctgcctcccgggttcaagtgattctcctacatcagcctccggagtagctgggactacaggcgcccgccaccacacccagctaatttttggggttttttttgttgttgatgttgttgttgtttgttttttgttttgagacggagtctcgctctgtcacccaggctggagtgcagtggcgcgatctcagctcactgcaagctctgtctcccaggttcacgccattctcctgcctcagcctccccagcagctgggactacaggcgcccgacaccacacccggctaattttttgtattttttgtagagacagggtttcaccgtgttagccaggatggtctcgatctcctgaccttgtgttccgcctgcctcggcctcccaaagtgctgggattacaggcgtgagccaccgcgcccggccattttttattattttttatttttattttatttttagtagacaccatgttggtcaggctcaaactcctgacttcagttaatccacccgcctcagcctgccaaagtgcggggatcacaggtgtgagccaccgcacccggccgcatcagcatttttgaaacacctgcttatgactttggaggaaccagatgggatgtatagattctttgagagcagtgccggtggcttgaagatattcagcaccaaggccagtgacccaaaccccaaggaagttaagaagccatggccgggcaaggtggctcacgcctgtaatcccagtacattgcgaggccgaggcgggcggatcacctgaggtcaggagttcggaaccagcctgaccaacatggcgaaactcgtctctactaaaaatacaaaattagccaggcgtggtggcgggcgcctgtaatcccagctactcgggaggctgaggcaggagaatcgcttgaacccgggaggcggaggttgcagtgagccgagatcgcaccactgcactccagcctgggcgacaagagcgaaactccgtcaaaaaaaaaaaaaaaagccataaagcagaagttctcaaccctggctgcagattggaagagcttaaacacacacacacacacacacacacacacacacacacacacacacagtgtctgggctccaccttagtctaattggatcaaaattggatcaacagcactggagaagtagattctggcattgctactgctgtttttaaaaccccgcttttgctggtgatgctaacatgtaaaaaggattgagcatgcctgcagtaatgaatggacaaacaggaggtggagtgttccaaagaataggtagcactatggaaaccataagactttgagtctaaaaggaaccttgcaaaggaggtcatctgcctcctccgccctgcttccatggtcatttgcctcctccgccctgcttcccggtcatcgcctcctccgccctgcttccggggtcatccgcctcctccgccctgtttccggggtcatctgcctcctccgccctgcttccggggtcatcgcctcctgcttccggggtcatcgcctcctccgccctgcttccggggtcatcgcctcctccgccctgcttccggggtcatctgcctcctccgccctgtttccggggtcatctgcctcctccgccctgtttccggggtcatccacctcctctaccctacctccatgaaaactattcctggcgctctctaaagagatcagtgctaccctccactccagggtcatctcgcttggcctctctactttttatatccacaaggtcaagaaatagcccagacattcctctcagccaattggagcactcgacggagcccagttcataaaacacacacacacacacacacacacacactcacacacactcacacactcagaaaccacagggctgtagatataacggcagtctggcagttggagaatgtatcctgctttcaagatttttcaaaaggaaaatcaagtgttgcttggttattttaatggaataaaaattggaaaccactttaaagttaaacataggatgttggttatatttgaaaagttaattaatcaggggttgggcatctgcataataaaattcaatgcagccattacaaagtatgcttcatatgaaagtttaatgacacgagaagctatgcatgctgttacatgaaaaatggatgtaccatatgatcccaattttgtaaaaaaaaaatgcttggaagtttttagacatttaaaacaaaaatatgcagtgttaacagctattatcatagaatgttggggaaacagataatttttattttccttgtatttttatttttctatctgatccttttttttttttttttttttttgagacagagtctcgttcttgttggctggagtgcaatggcgcgatctcggctcactgcaatctctgcctcccgcatttgagcaattcttctgcctcagcctcccaagtaggtgggatcacaggtgcctgccaccaagcccggctaatttttgtatttttagtagagacggggtttcaccatgttggccaggctggtctcaaactcctgacctcaggtgatccacccacctcggcctcccaaagttctgggattaaaggcgtgcgctactgcacccggccttgatccatattttctataataaacacatattgattttgtcagaaaaaaatgtaataaaaatgcttagatgctagaccagtggattgatccatgaaaatttgccattttcaacagaagattgctgggagctttgggctaaaataaaatttcataccataatcaaagacattcaaataataacaatatagattctttcctggaataaacaacttctttaaggcaaatgtccacatttccttggagttaaatattaatctgatagaactcagcctaggagatgaaatttagtttatgtgaaatttttatgaactaataaatgggctggatcaaacagcaggaccagaatagagtcacaaagaggtgttacaagatcaagcatttactgtgaattctccattgctttcttaaaagggtatcaacttggatgaggcacttacctacctagcgtctacagcatagcacctacacgcctagacagtgtcccgggtgggaagccgtgctggaagcggaaagcggctgtgagaagggaaattagcaagacccttatccgaggcgagctgggagagccactcttgggttctctttgcataggtcaccttcagcaggaagtttaaaagctggaaccatgttcagttaaatataaatatcaagtcgtgcttgatggggttccagaggagccacggcccagacgccatagtcgccaactgtgcaccaccataaatgatcggatatgatccgatgcacagggctcacggctccattaatggttcagtgctccaatctcctaccagagtggagcttctgaagtgctcttggctaaacagaacagtctccatccatccattaagaaacatgttttcaatactgatgttttcaaagcaacctatttctcttgttaaaaacataattcaaataatttaaaaatgcagtctgggccgggcacagtggctcacacttgaaatcccagcactttgggaggccgaggcaggaggatcacttgaggtcaggagttcgagaccagcctggccaacatgggaaaaccccatctctcctaaaaatataaaaattagcctggcatggtggcgcccgcctgtagtcccagctactcaggaggctgaggcaagagaatcacttgaacctgggaggcagaggttgcaatgagccgagattgtgctactgtactccagcctgggcaaaagagtgagactccatctcaaaaacaaaaaagaaaacaggaaggaccatttaggtagtgttatggactgaatatttgtgtccctctaaaattcatatgtggacggctgggcgcggtggctcacgcctgtaatcccagcactttgggaggccgaggagggcggatcacgaggtcaggagatcaagaccatcctggctaacacggtgaaaccctgtctctactaaaaatacaaaaaattagccgggcgtcgtgatgggcacctgtagtcccagctacttgggaggctgaggcaggagaatggcgtgaacccgggagacggagcttgcagtgagcagagatcgtaccactgcactccagcctgggcaacagagcaagactccgtctcaaaaaaaaaaaaattcatatgtggacatctgaacctccaatgtgatggtattaggatgtggggctttgagagatgattcggtcaggcaggcagagccttcatgaatgacattagtggctgtttttgttttttctttctggagatggagttttgctcttgttgcccaggctggagtgcagtggtgtgatcttggctcaccacaacttctgcctcctgggttcaagcgattcttctgcctcagccccccgagtagctgggattacaggcgcccgccaccacacccggctaattttgtatttttagtagagacagggtttctccatgttggtcaggttggtctcaaactcccaaactcaggtgatccacccacctcgggctcccaaagtgctgggattataggcgtgagccaccgcacctggccaagcttagtgaccttttaagaagagatatagggggcctggcgcggtggctcacgcctgtaatcccagcactttgggaggccaaggtgggtggatcatgaggtcaggagatcgagaccatcccgactaacacggtgaaaccccgtctctactaaaaataccaaaaaattagccgggtgtggggtgggagcccatagtcccagctacttgggaggctgagacaggagaatggcctgaacccgggagacggagcttgcagtgagccgagatcacgccactgcactccagcctgggggatagagcaagactccgtctcaaaaaacagagacacgaggcttgctctgtctctctgtctctgctgtctgccaggtggggacggagtgtccatctgcaaaccaggaccctcggccgacgctgggtctgcctgcaccttcacctcagacttcccagcctccagaacggtgggaaatataggttgttcaaactacccagtctatggtaatttgttatagtagcttaaactaagaaagatagtttttgtctttgttttctttttaaagtgtacaattctggctgggtgcggtggctcacgcctgtaatcccagtactttgggaggccaagaggccgaggagggtggatcacctgaggtcaggagttcgagaccagcctggccaacgtggcaaaaccccgtctctactaaaaatacaaaaattagctgggcgtggtggtgggtgcctgtagtcccaactactagggagggtgaggcaggagaatcccttgaacctgggaggcggaggttgcagtgagccgagatcacaccattgccctccagcctggacgacggagtaagaatccgtctcaaaaagtaaataaataaatggcacaattcagtggcattgagtacattcccatttgtgtaactaccacttctacgtggtttgaaaacacctcatgattccaaaagaaatcaccatacccgttatgcagtccctcccataggttttaaaacaaggaggaagtggcctggcacgggtctctgacccagtaccccacagagacagccggaaggactctgagccagtaccccacagagacagccggaaggactctgagccagtaccccacagagactgctggaaggactctgatccagtaccccacagagaaacactggaaggactctgacccggtatcccacagagatagccggaaggactctgaccctgtaccccacatagatagccggaaggactctgagccagtaccccacagagaccgctggaaggactctgatccagtaccccacagagaaaccctggaaggactctgacccagtaccccacagagatagccagaaggactctgaccctgtaccccacagagatagctggaaggactctgagccagtaccccacagagacagccagaaggactctgacccagtaccccacagagaccgctggaaggactctgatccagtatcccacagagaaacactggaaggactctgacccagtaccccacagagaccactggaaggactctgacccagtaccccacagggaccactggaaggactctggcccggtaccccacagagactgctggaaggactctgacccagtaccccacagaaaccatgggaaggactctgacccagtactccagagggcccactggaaggactctgacccagtacccgacagagaccactggaaggaccctgaccaagtacaccacagagactgctggaaggactctgacccagtacctcagagggcccactggaaggactctaagccagtaccccacagagaccgctagaaggactctgactcggtactccacagagattgctagaaggactctgacccagtaccccacagagaccactggaaggactctgacccagtaccccacagagacagctggaaggactctgacccagtaccccacagttctaaggaagagggttagtccacggagctgcagaggtgcccgctccggctctatggggtcagcaggaggtgactcaggaccacctctgaagatgggctttgggtcctgagctcatgcacacaagcaaattggtgttaaaacccgacagcgtttgcttgtattcctttccccagtcactcagcaaccacttaatgcagacagtgtgccagatgctgaggccactgccccggggtgagttatgagggggtcagcctctccttcctttgccttcccatccccaccgagagaggagaagcaactccggcatggggtgggagggcaggacgttgggaggcagagggaactccatagagcttccccggagactagggagtggtggggaggacaggccactggtgccaacctgtgactgctcccgcctatgtcccctccctcacagttcccctgggagtgccagccccttgaccggtgggatgcggcccaccaaaaacccagggcatccttagcagagacctctctcagacactggcagcttcaagggattacgtggctcagttggcagcatctcaggggggtccagtgtggatttgagtgttttcctcaaatgcccggacggtgaaagactcttgggaactctgcataacgcaagaggcaaagggaaggagactcagtatgactaagattgatttcacttttggtagcccagtaggataggggctccgagatgggttgagcctaattcaggagtgacatgacagtttctgcataaagttcatgcacatgatacagagatgaacagcacatgccccccagctctccggggactggcagtctagtggaaaactgcccgggcccccacattatttcttgagaacattctgaggaattttgtaccctggtgatcctttatttgatgttgtctctacaagttcgcaaagttgctacagcccattgtgcagataaaaaaacgaaactcgagtaatttagtgactttcttatagcctaatagtatccgattcagctgggcaaagtggctcacagctgtaatcccggcactttgggaggccaaggcagacacatcacctgagctcaggagttcgagaccagcctggccaacatggcgaaaccccctctctactaaaaatataaaagtgagcctggtgtggtggcaggcacctgtaatcccagctactcgggaggctgaggcagggggaatcgcttaaacccgggaggcggaggttgcatgcagtgagccgagatcgcaccaatgcactccagcctggatgacagagtgagactctgtctcaaaccaaaaaaaaagcaagtaccattacctcagtaagtgaacacaattgtattggggtgtgtgtgtgtgtgtgtgtgtgtgtgtgtgtgtgtaagttctggggtacctgtgcaggaggtgcaggtttgttacatgggtaaacatgtgccatggtggtttgctgcatagatcaatccatcccctgggtattaagcccaggatctattagttattcttccggatgctctccctcccctgcccctctccccgacgggccccagtgtatgccgttccctgccatgtctccaagtatttggttagtgtgtgtgttttaagagacagggtcttgctatgttggccaggctggtcttgaactcctgggctcaagtaacccctctgccttggcctcccaaagtgctggaataacagatatgagccggccgggtgcagtggctcatgcctgtaatcccagcactttgggaggccaaggcaggaggaccacctgaagtcaggagttcaagaccagcctggccaacatggtgaaaccctgtctctactaaaaatacaaaattagctgggcgtggtggtgcatgcctgtaatcccagctactcgggaggctgaggcaggagaatcgcttgaacccgggaggtggaggttgcagtgagctgagatcatgccattgaactccagcctgggcaacaagagcaaaactccaggccgggtgcggtggctcaggcctgtaatcccagcactttgggaggctgaagcaggcagatcacaaggtcaggagatcgagaccatcctggctgacacggtgaaaccccgtctctactaaaaatacaaaaattagctgggcgtggtggcaggcacctgtagtcccaactattcgggaggctgaggcaggaaaatcgcgtgaacctgggaggcagagcttgcagtgagctgagatcgcgccactgcactccagcctgggcgacagagcaagactctgtctcaaaaacaaacaaacaaacaaacaaaaacaggtgtgagccaccatgctgttgtgtgttttgggtctaacgtatgaagcaaagggctggtcagacatctcatgggtaccaccacacacggtcacaaacaacagggagctgcaccgtgtccttgaagagagtgatgacaagttgtaagctgctgaggaagataaggaggcagctctgtgcagggtaggttgagaggggttacatgagaggcagggcactggctcagaggtggctgccatggagtcaggttgaaaacaacggggccccagccagtagagcacgcaacagaggatagaacaggaaacagagaggacgcaagggcgtgttccagggtgaaaaacacaaactgccatattcatttagtaaaaacttgccacttttggggaaacgattgttttttgtttttgtttttgttttttgagatggagtctcgctctgttgctcagggtggaatgcagtagcgtgatctcagctcactgcaacctccgcctcccgggttcaaacgattctcctgcctcatcctcctgagtagctgggattacaggtgcccgccaccacgcccggctaatttttgtatttttagtagagacagggttttgccatgttggccaggctggtctccatctcctgacctcaggtgatccgcccacctcggcctcccaaagtgctgggattatgggcgtgagccaccgcgcccggccactagaagagttttactacacgtgttacggagtaatgaaatggttcactcgtttcagcatcaaatcatcttttcaaagtaaactgcatttctaaccgcttcttcttgaggcaataaaaaacacagtgccatctcatctttattttgtgctactagaagatgctatccgttaaaaatgactgtgttccccaagaatgtgttcatataattttggatgcaatgcaaaatactttttatggtggtcttctaccaaacacaaaaagcagtaccgaacctgtgaatgccgcaagctacacacaccctaggagagagcgcccccttgtgggaatcagtcacatcaacagattcagacacaccaacagctggctccaacgcggggagcactcaacaagtcttgacccttctgtgttctgatttcaacagctttgattgattgattgattgactgactgagacggagtctcactctgtccctcaggctggagtgctgtggtgcgatatcggttcactgcaacgtccgcttcccgggttcaagtgattctcctgcctcagcctcctgagtagctgggactacaggcgaccccccaccaagcctggctaattttttgaatttttagtagagacggggtttcaccgtgttagccaggctggtctcgaacccctgacctcgtgatccgcccgcctcggcctcccaaagtgctgggattacaggtgtgagccaccgtgcccggccctgcaattccttttctaatgaaaaaagtcattaggagaataaaatgaatttgcatggataaagcactttctatgaaaacataaaacatttgctacacaagtcaatgaattaataaacatggaaaaccacataacacacatatattcaataacacctgctttcaaaggtggtcacgttctttcaaaaatagttcagtccttccgttctttgctccagacccacttttatatgacccaggacaaaacagaaaatttaaaaacatttttggcagagaatacaaaatcagattaagtgacagaccatagtgatactgaaaatacataacttgagccacttcacagttttgaatgaacagagtgtgtaatccttttcatttccccctaaaaatgatatctatttaaaatagataaatattaatgcctctctatttggggcctaactatttactgtttttcacccaaataactcaacattctgaaacaaacaaacaaaggatcttacttttcctttgtctattatccctgatatcttcattttctccaagtagaagtattttctccaagtggaagcaatttagcatctggcacatggggtgggaaagctattgaaatggaatgtttttccctcgcaatagtacatgcagtcaaccaaccaaagtctgaagaacactgaaatcgagccaacaagtttctttttttttttttttttgtttttaagacagggtctcactttgtcacccgggctggagtgcagtggcacagtctcggctcactgcagcctcctcaacctcccaggttcaagtgatcctcctgcctcagccccacaagtagctgggactacgggcgcccgccaccacacctgactaatttttggtattttttatagagacagtgtttctccatgttgcctaagttggtcttgacctcctgagctcaagcagcacttcccaaagtgctgggattacaggcgtgagccaccatgcctggcccaaaatacttaaaattcaagttagctgcacaaatactacagtaagacaaaagaggccgggcgcattggcccggggtcacgaggtcaggagttcaagaccagtctggccaatatggtgaaaccccatctctactaaaaatacaaaaattagccgggcatggtggcgggcacctgtaatcccagctccttgggacgctgagacaggagaatcgcttgaacccgggaggtggaggtcgcagtgagctgagatcatgtcattgcactcaaacctgggcggcagagcaagactccgtctcaacaacaaaaaaaaaaagacaaaagacagtcgtgctgttaaaacggaaatactgggtgacaggcagtgccactgtgtgaagcagaagcaccagcaaggaaagcagaatggtctcaccaagaacacactggactcgggagactgatgacctgatgacctggatttaaatctattccgcatcatttcacacccacttcaccttcgacaagcgtctcaatacttaattttgtaaaatgagactgataatttctatcttaaccaaaagattattatgaagccaaaaaacagataatacatgaaaaaatactgtgtaagttactatagatctgttatccatatacaatgttacgtgttatgactgcacctcatctcactaatcatattctgccttgtatcatactaacctgagtatctgccttaattccctcgagcaccgagattagaaactcgtatggggccatgttggtctttttgaggcaggaaaatagggtctggagtcagggaacataaggcacattcacacttcagctatgacaggaaacatcccctccgtggggcgtaagccaagtaaatgactttgtaactttcctacctcctctcctttcacatacggcgtaccccaagtagagggtattcaaactcacaaaaactctgcaaggcggcctctgagcccctgtgcccgggctgcccccacactgtggagtgtgctttcatttccaataaatccctcactgctcccttgcttgctttgtgcgttttgtccagttccttgttcaagacgccaagaacggctgggcacaggggctgtcacctgtaatcccagcactttgggagaccaaggcaggtgggtcacctgaggtcaggagttcgagaccagcctggacaacatgatgaaaccctgtctctactagaaacacaaaattatccagctgtggtggcgggcacctgtaatctcagctactcgggaggctgaggtgggagaatcgcttgaacccaggaggtggaggttgcagtgagcccagattgcgccactgcactccagcctgggcaacaagagtgaaactccatctcaaacaaacaaaaaaagtgggcaaaggacatgaatagatatttctagaagaagatacacaaacaggcaacacatatgaaaaaaatgctcaaaatcactaatcatcaaggaaatgcaaattaaattaccagaaggagagaccaccttactcctacaagaatggttgtaatttaaaagtcaaaaagcaataaatgttggcttagatatggtgaaaagagaacacttggccgggtgcagtggctcacacctgtaatccccacacgttgggaggccaaggtgggtgggtcacttgaggtgaggtcaggagtttaagaccagcctagctaatctggtgaaaccccatctctactaaaaatagaaaaattagccaggtgtggtggcacacgcctgcagtcgcagctactagcgaggctgaggcaggagaatctattgaacctgggagccggaggctgcagtgcgccgagatcgcgccactgcactccagcctgggagacagcgagactccgtctcaaaaaaaaaaaaaaaaaaaaaaaaaaaaaaagagttcgagaccagtctggccaatatggtgaaaccccgtctctaataaaatacaaaaattagccgggcatggtggtgtgcacctgtagtcccagctactcaggaggctgaggcaggtgatccacccgccttgagcacccatgtccagcccagaaaaacaaattttaaaaagaatcagggccaggcacagtggcttgtgcctgtaatctcaacactttgggagactgaggcgggaggatcgtttcagcccaggagttcgagactagcctgggagaaactccatctcaacgtggagaaactccgtctctacaaaaaatacaaaaattagctgggcctggtggcacgcatgtagtcccagctactcgagaggctgacgtgggaggatcactttaaccggggaggcagaggttgcaggagctgagattgtgccactgcactccagcctgaataacagcgtgagaatccgcctcaaaacaaagaaacaaaaaccacacacacacacacacacacaagttgtactagtggttccagccagtgcaagtgggcaagataaacgcataaaagaattaaaactgtatagattcatagacatgattatgtagaaaacctgaaggaatttacaagcaaaagaaagcagcccactagaactaatacgtccgtttagcagggttgcagactaaaatattaatagacaaaaataaattatatttctttaaagtagcaacgagcaatcaaaagaaagctttgaaatgtaaaaagcaagcatttgcagtcccatcaaacattattaaatgctcaggggaagatgtgagacaatcattgacagacctgtacacactgaacagcacaaaacattacttaagttaaagaaggcccaaacaggccgggcgcggtggctcacgcctgtaatcccagcactttgggaggccgaggcgggcggatcacgaggtcaggagatcgagaccaacctggctaacgcggtgaaaccccatctgtactaaaaatagaaaaaattagccgggcgtggtggtgcgctcctgtagtcccagctacttgggaggctgaggcaggaaaatcgcttgaacccaggaggcggaggttgcagtgagccgagatcgcaccactgcactccaggctgggcaacagagcgagattccgtctcaaaaaaaaaaaaaaaaaagaaaaagaaaatatagagatggcaaatggcacataacaagatggtcaatatcaattcctagtcactagaaaataggcattaaaagtgcaagataccaccataaacctatcggagaggcaagatgtcaatgccggactatgctgagtgctggagatgatgtggaggaatgggagcgttcatatgcactggtgaaaacgtcaaatggtaccaccttgtaaaactactggatagtttccaaaaaagttaaatatactcctgccatgccatccaaccattccgccatttatccacaagaaaggaacgacatgcccatataaagacttatacgcaaacacttacaggtgctttatttgtcatggacaaaaactggaaacacccaaatgtccatcaaataggtgaataaacaaattgaggtatatcaaacaatggaatacgtctcagcaataaaaggaatgaaaggaataaaaggaataaactactgatacgcacagcttgcagtgagccgagatcacgccactgcactccagcctgggagacagggtgagattccatctcaaaaaaaaaaaaaatgttaatagctccccagatcgatttatagatttaataaaatcataagcaaaatcccagcaggtttctgttgttgctggtctgttactgaaatcgacaaactgattcttaaatgtatgcggaaatgcaaaaaccaataaaatcttgaacagcaaacctggaggcctcacgttaccgaatattgaattattttaaatctagtgtggcactggcattaggacaaatagaccgatgaggaaatacattgtgctaggaccattggatctctatatggaaaaaattttaaccatctccctcataccatgcacgaaatagattctagatgattctacatctagccatgacaggcaaaccattcctagaaaataacataaaagattcatgacctggccgggcgtggtggctcacgcctgtaatcccagcactttgggaggccaaggcaggcagatcacctaaggtcaggagttcgagaccagcctggccaacatgatgaaaccctgtctctactaaaaatacaaaattagccaggcgtggtggtgcatgcctgtaatcccagctactcaggaggctgaggcaggagaatcgcttgaacctgggaggtagaggttgcggtgagccgagatcttgccattgcactccagcctaggcaacgagagcgaaactccgtctcaaaaaaaaaaaaaaaaaaattagcctggcgtggtggagcgcacctgtaatcccagctacttgggaggctgaggcaggagaatcgcttgaacctgagaggtggaggttacagtgagccaagatggcgccactgccctccagcctgggcataagattgagactccgtctcaaaaaaaaaaaaaagatttatgatcttagaatagacaagtattttttaaataggacatagaaagtgcttaccttaaaggaaaagatggataaactggactgtattaaaattaagggcttctgttcctcaaaagacatcattaagagaatgaaaaagcaaggcacggcatggaagaagacagtaacaaaaacaactccaaaaacatactaaataaagacgcttagaaatcggtatcaaaacgacatcccaacagaaaaccgggcaaaaagtgtgcatgtaacaacagagatatccaaatgttcaatatattacaaagtgcttaacctcattagtaatcagagaaatgcaaactcaagccagaattaaacctcctacatacccacctacatacccaccagcatcactgtaactaaacaatgatcaggctgatatagtggctcatgcctgtaatctcagtgctcagagaggctgaggctggaggatcgcctgagaccaggagttcctgaccagcctgggccatgtagtgagactccatctctaccaaaaaataataataaataaattaaattacccaggcatggtgacacacacttacagtcctagctactcaagaggctgaggtggggctggtggctcacgcctgtaatcccagcactttgggaggccaaggcaaagttgggaggcaagatgaactgaggtcagcagttcgagaccagcctggccatcatggccaaccccgtctctcctaaaacacaaaattagccaggtgtggtggtgggcgcctgtaatcccagctactcgggaggctgaggcaggagaatcacttcaacccgggaggcagaggttgcagtgagctgagatcgcgccactacactccagcctgggcaacaagagtgaaactccatctcgaaaaaaaaaaaaaaaaagaggctgagatgggaggatcatttgagcccaggagtttaagaatgcaatgaactattaccatgctactgcatgctcaccagagtgatagagtgagaccctgtctctctaggaaaaaaaaaaaaagtgatcttatccaacgtcagtgaggatgtggagtagctggaactctcaaacccagctgataggactgtaaaatagtacaactcatttaaaaaacttttatagtttatctactgttcatctctaatgacccagttaattacttataaatgcacacatgtatatgccaaaatacatgtccaagaatattcgtaacattatttgtaacatccaaaacatgaaaatactccaatgtccatccacagaacagtggtatacaattgccacagaatactacatagctatgaaaacacgctattatcacaatgacatggattcataccacaaacacgctgacagataaaactccagaaaatactgtatgattccatttctatcaaattcagaaactaccaagactaactgaagttgataaaacactagtttccattttgggggtaagagagtaaacactgggagggggtcataacggggtcttataggatgctggtcctgttctatttcttgatgtgggcggtggttaaatggtgcattccctttgtgaaaatgcatgaagctatacacctttggtttggtttatgtttctacgttacacttgagtaaaagtttactttaaaaatacaggaacagcatacaagaacacttccaggccgggcgcggcggctcacgcctgtaatcccagcactttgggaggctgaggtggacggattgcttaaacccaggagttcgagaccagcctgggaaacatggtgaaactccatctccacaaaaaatacaaaaattagccaaacgcggtggtgcacgcctgtggtgctagcgactcgggaggctgaagcaggaggatccctggagcccaggatgctgaggtcagtgagccatgatcgtgccactgcattgcagcctgggcgatagagcaagaccctgtctcacataaaaatgaaaaaataactttctgtctccccttatacacagcaggccggctacctccagtccagcacagtgaactggtgctacaagggccaacccaggctctgccccaaagcaggagctgagaccgtttcctagaaggcaggcccactggaaatgtctccaccaaaagcagctacaaacgaatatgaccttcaggtattaaggctttggttctctagaaaactgtcacggcactgaggtaacttgacaacccataatcgctgttctccatgtaaactgtggctctatttgtccaaggtgaagtatcgtaaattgaaatgaagtactcaattgtaaattttttttttaaatttccaaattaagctaaattaaaaaaacaaaaattgccaaaaccttaacctacaaaataaactttttggacagtagccacctgagctctaaataattgtatcatttatatttcaaatctaatacactggtgaatatgcgtattgcagcttttccaagacacgtattaatcatgaaacatgtactgacctcgaaaatgtggccgcgcgcggtagctcacacctgtaatcccagcactttgggaggccgaggcaggcggatcacgaggtcaggagatcgagaccatcctggctaacacggtgaaacccggtctctactaaaaatacaaaaaattagccgggcctggtggcgggcgcctgtagtctcagctactctggaggctgaggcaggacaatggtgtgaacccgggaggcggagcttgcagtgagccgaggttgcaccactgcactccagcctgggtgacagagagagactctgtctccaaaaaaaaaaaaaaaaaaaaaagtttaaatactttaaatgatcactttagaatatattaataagggggaatatagtatttcaagaaaatagttttaatgaagagcaaaaggtagtatggcctaatgagactcttcagtgacacagatgaactgaattctgtatttgaattattagccatgcagctttcagcaagttccttaactacttcccattcagcttttcccatctgcacaatgcaggctcacctgattattattgagcgcttacgtgtgagattccagacattgcttagtaacgagcacagtgcctggtgcaaagctggtacgcaatgttagcaaaactattattattttttttttgagacaagaatctcgctctgtcgctcaggctggagtgcagtgctgcgatctcggctcactgcaagctccgcctcccgggttcacgccattctccggcctcagcctcccgagtagctgggactacaggcgcccgccaccacacccggctaattttttgtattttttagtagagacgggatttcaccgtgtcagccaggatggtctcgatctcctgacctcgtgatccgcccacgtcggcctcccaaagtgctgggattacaggcgtgagccaccgcgcccggccaatgttagctaaatattaacagtatctattacaatcctacgaactcaaagaaacaggataaaacaacacagggcttggttttcctgatccaggttggatctgggagcattcccatttcctctcacagtgctcacaaaggcttcctttaatgacacactctaggatttcaccagttttccatgaactattacttgttacaattttcaaaagaacacaggggtcacacctttatcccgctttttcagcaagcctcactctcctctattgtcctaggatcaggaagcagctaatttggggtctcatttataaggctcaaggcatttgtctgggacagaagccaattaatgtctccatttatcccaccagtttcccctttcagtgatggaagttcatccccatcttcctataggaccgaaatttaactttgcagacgtgctgttctgaggacccacccggaacagagcatgtacacaaacccacttactgtcgcttctaacattgtaggaagcctttgggttttccaaggcagcaaagtactgagatttgtaattaaaaacacatattagctacattcaagttgtaactaactaaaaacttctacttaagtcgactgatcctcaaagtaagactcaaatcaaaaccagaaaagtttgggggcaattccctttccagcccacaaatacaggaactgggagtgacaccgtcctcacagggctacggcacctttctgcagcttccctggctccctttcaattttttttttttttttttttttttgagacggagttctgctcttattgcccagattagagtgcagtggcgcgatcttggctcactgcaagctccgccttccagtttccagcgattgtcctgcctcaggcctcccaagtcactggatgttaattacacccagcaaggtcgcccgccaccacgcctggctaatttttttgtatttttagtagagacagggtttccccatgttgtccaggctggtctcttaactgctgacctcgtgatccacccaccacggcctccgaaagtgctgggattacaggcgtgagccaccgcacccggcctttcaatttttgataaggatctttccttttttttttttttgagacagtctcactctgtcgcccaggctggagtgcagtagcgtgatctcggctcactgcaacctctgcctcccgggttcaagcgattctcctgcctcagcctcccgagtagctgggagtacaggcgtgcgccaccatgcctggctaattttttgtacttttagtagagacggagtttcaccgtgttagccaggatggtctcaatctcctgacctcgtgatccgcccgcctcggcctctcaaattgcagggattacaggtgtgagccaccgcacccagccgagtggtttctttaaactctgcaacagacttgacgaattccttggattttgacctttaagtgtagcaggtgtgctggaaacagagcaaatcaacttgaaagcttcttggaggttgctccaaacagcagcatataattatattcaatggtctccctatctctcggaaaagcaactcacaaaaacatgtttattctcattgccagcactcactaaacgctactaggatatcgctgatctgttcatttcctaaatctctgctactaacactttaaaccgagagtaaacttgcagtctcaacatccaattttagaagacaagtgtgacgaggaaggatttatcaactgaaaaatgtttactgacacagggaatctagaaatgtaccttccagatacatacaaatatttaagcaaaaactgttccaagggtatttcctgcagcacctgcccaaaaggagcaaactggtcttaacaaaatcaggtgtacatcaatgttacgcagtcagaatgagacacatctgaatgcctaacataaaaagatctacagtaactaggtatctatacacattgatgtataaactgtttatggaaagaagcttcttatacagtgtttctggaaagggagactgctatcctgctgtctataatgtgtgtatggattactaagaaaggattgagtaattctccactactgccactagcctctggaggaagagggcacacagtttttacctctaagaattattataagacattcagccttatttggttgtatgaaatactatgctagaaaatgatccataattacaccttgtactactcatgttgtactttaatgattaaaataaataccatgttgctgcctggtctggaggacaagacacaccatcaactgactcagtgttcttcacaaccagactacaggcaatttttttccaaaacatacatctttgggaagcaaacaaattatttatggaagaaaaaaggaggaatgtttcacattcaggcaaacataatactgtcagtgtgtttggactagagattttattttagaagtataaaggatggaggcgcgatatttggcatttttaatttaggtttgttttatttaagtttaatgttaattccatgctgtgtttcagtaagaacaatacagattctgtatctgtggctccagtcagatatccagtagtacaaattagcttcaagttacacatactgaacaaaagaggttgagcgagcgaaggaggggaggagtgaggggaaggaggtagggggagggggaaggagaagaaacaaaagaattgaacaggcatgcaggcttttccataccaccttcaacgctaacctgcttcagtgggagagtaaagtaggcaagaatgagcagccacggattgttgaactgttaccagcaccatgcttttcagcaacatttcagcggagttggaaacattttttacagcaaaaccattacaacgaagtccctccccaaaccacctttaaccatctcaagctaacacccaattacttgcaaacactggtataaaacacagtttaaacaattagaaaaatgaaaactgataccacttatgcctctatagtgtgattaacctctctcttagatgcttgcatcacctataagtctaatggctttcaaatgtaatttccatttgctaatggtgatcttgccacatctggcacggagacgacacagtaatgctgaaaaagcctctatgtagtcctgttagtgtcttaaagaacctaaaagctgggaccagtaaaatccacagaaattcactcttgcctttaagaacttttgaaaactgtttaaaaaaaaaaaaaaaaaaccaacagggcaggaacctaaattctgagaccaaatgtaaaagtcagatttggtggttctcagtgacaatggggagtttccaaagggtgggatggggaggagggggtggtcagagatggtttctcttgttggcttatgtctcactgattttcgtcttccacgtcctgcagcgcttctttattctgctcttcacctgttaaaaaagaaaaaaagtcaattatttcgtattgactacattaggctatggcagccacaaacaaaggtgtcattccaagcataaagactcttctacttgctacaattggtattaaacgcaggcaaaggacttctatcatccttgacacctgagatgcctaagccaagaagggattatggtcctgaaagtatttattggtcaacagaatgaaaaaaactgatgcgcagtacaactcaatgtttttacgctaaataagctcttgacgtagacagccaaggaaaccatcttactaaaatgacattcaagctttcacataaatcttgggtcaaaatactctttctcaataacctcacctcttcaagaatcaagagtattttgcaaactttttgcaaaatctaatttacccacaagctaattatcagaaatgcttcaaaatagttaactgagcaataaactgttgccaagaagttctatcgtattttattgtggggttctgctgttataaatatttcagcttttgtatcttggccagatacaccaaactataatcagattttacttcagagtgaaacacagcatgctcaaagtaaatcagaccactgaggttattaaagaatggcatttggaccacttcactcatgctatttgtcttttgcctttaaagagggtgattaccctaaggagtttcaactgcactatgacatgcaacagaaagccacctattggttggagggtcatctacctattagtatgcattaaacaagtcagccaaaataaagaagcatgcaggcttttcccttaaaaatgatgtaacaggtaaaagttacattcacttgtacttttttaaaaaaaccacttacaattactacacagttaactagtttgaaacaaaataaatgaaaaatcaacccaagaatcataaatgttcaaatgactatccattcataatgcttgttaaattatttaattaggatggacaaataacaccaaactagctgcctacacacatgaagcatttacactgagtacagctttgaaacagcctaaatgatctcaaaatgacaaatgtcacagcatcaaggtttcagtagttttcaaatctcttctgcggcggaaacgcttgacattgctgtgtgacttcaaaacccacttacagcctcagcaacacagtgaagccctgtctctacaaaaaatgaacataacgccgggcacggtggctcacgcctgtaatcccagcactttgggaagcaaaggcgggcggatcacgaggtcagaagatcaagaccatcctggctaacacagtaaatccccatctctactgaaaaaataatacaaaaaattagcctggcgtggtggcacatgcctgtaatcccagctacctgggaagctgaggcatgagaattgcttgaacccaggagacggaggttgcagcgagccaagaacatgccactacactccagcctgggtaacagagtgagactccgtctcaaaaaaaaaaaaaaaagaataaataaaactaaaagtaaaaaactatgtatgctggagccaggcatggtggctcacgcctgtaataccagcactttgggaggccaagagaggtggatcatgaggtcaggagatcgagaccatcctggctaacacagtgaaaccctgtctctactaaaaatacaaaaaaaaaaaaaaaaaattagccaggcatggtggcaggcgcctgtagtcccagctactcgggaggcaggagaatggcgtgaacccaggaggcggagctttcagtgagccaagattctgccgctgcactccagcctgggcgacaatcgagactccgtctcaaaaaaaaaaaaaactacatacgctgggcatggggccacatgtctatagtcccagctacttggggggctgaggtgggggagttctatttctgcagtgagctttgaacgccactgcactccaggcggggcaacaagagcaaaactccgtctcaaaaaaatgtataaaattttaaaactacttaaaatacatgaagatctttaattcataagacagaaaaaaaatatgcaaaggcaaaaaaaaattgcttagggatgaaagaactgatgggcacccaactgttctccaaaggacaataacgtattcaaacgtaggaaacatgataggaacattcactctaacagcaaatcactgccaaagtatcattaacacaaacactagaacacaactcgcttgtaagcaaccatgagatgtgccagaagttccaagtaactttggcataaaaatgtcactgtcatatacatcacatccaaccacagtaggcaggaggagcaggccggaaaaggcttaggtcagcgccctggaaggtggaacaggcagagtctgtaagcaacaggacgatcatacgcaggcatgattagtgaagaaccaaaactgaaagcggaattcactgtgccatgaacgtgacttacaaagtagagtttttaggaaaggaagagttgggttttcctttaggaatctatattgcaaggaaaaagggagggagaacaatcatatgaaagcaacattacaagaaaaataaaccaacagagcaggacaaaggaaaacaatgatacaggagccggactttggtcttacttcgtgtaaacttcactctaagcaacaatctgtctactcctcctcccttctactctgagaaggaagtaatatcctcttgaaagacatacagatattaggggaaaaaggattccttggctatgtttctttgcccagtgtatctacattttggagagaggggaacaggcagggagaacatgtatttcctacctatggattcgtatatgaaacaatcctcttaccacagggtgaagagactaaaatcacttgagaaaaagcaatgatccctccctttaaagaaattatgttccaacatgctgggacagacattaacatattctaaaattaaaagacataaataccgtctctttaaaaaacaaaaaaatctaaataatccttaaactaaatgcaaagtcacatcctagtaaactgccactttcatgacgattctcctatattcaccacggaacccaagtcacaaaagtagtattttattttgtgagatgaagttttatcttgcccaagctggtgtcaaactcctgggctcaagtgatccttctgcctcaccttgctgaacagccgagattacaggcaggcaccattgcagtttcaaaaccaatttattaaaaaatgtaggccgggaacagtggctcacgcctgtaatcccagcattttgggaggccgaggcaggcggatcacgaggttaggagattgagaccatccgggttaacacggggaaaccccgcctctactaaaaatacaaaaaaaaattagccgggcatggtggcgggcacctgtagtcccagctaccaggaaggctgagacaggagaatggcgtgaacccgggaggcggagtttgcagtgagccaagatagcaccactgcactccagcctgggtgacaaagcaagactctgtctcacgaaaaaaggaaaaaaaaaaaagatgtaatactaggccaggtgcggtgactcgggcctgtaatcccagcactttgggaggctgaggcaggtggatcacgaggttaggagattgagaccatccgggctaacacggggaaaccctgtctctactgaaaatacgaattattgccaggcgtggtggtgggcacctgtagtcccagcaactcagagaggacgaggcagaagaatcgcttgaacccgggaggtggaagctgcagtgagcagagattgcgccactatactccaccctgggcaacagagtgatactccatctcaaaaactctaatttttgacaaattcaacttctcaaactgatgaacaatttctttgtacccacaattatttgtgtattcagagtttgttagttgtaccggaatgtcaacagaccacctgaatttttcactgttgaactatttcatgactggaagcattatataaataaaaagtatttcacctaataaaaattaagtgaaaattactcttcttaaccaaatttaatcaactgatttacagactcaataaggaattgaacacaaatgaatttcactagattttttttttttttgagacggagtcttgctctgtcgcccaggctggagtgcagtggtgctatctcggctcactgcaagctccgcctctgggttcaccccattctcctgcctcagcctcccaagtaaatgggactacaggcgcccaccaccacgcccgggtaattttttttgtatttttagtagagacggggtttcactgtgttagccaggatggtctcaatcttctgacctcgtgatccgcccgcctcagcctcccaaagtgctgggattaaccggcgtgagccactgcgcccagccgaatttcactagatttttaaaaactgcgaaagtattaccctgtattttttttttttggacgaagtttctctcttgttgcccaggctggagtgcaacggcgcgatctcagttgatcacaacctccaactcccaggttcaagcgattctcctgcctcagcctccccagtagctaggattacagacatgtgacacgacgcctggctaattttgtatttttagtagagatggggtttctccatgttggtcaggctggtctcgaactcctgacctcaggtgatccacccgcttcggcctcccaaagtgctgggattataggcgtgagccactgcaccaggccgtattaccctattttaagatgatccatttcctaaaactgtactcgacaaccaagaataaggattatctttagttctgtacatagactgacaggtagtctactttgattaatcaactcttggttatcagtgataatgagctacagaagtaatccagacttggttatgagttggtatcaaatgtgttttcttgttttgtttcgtttctttgagacagagttttgctcttgttgcccaggctggagtgcaatggagtgatcttggctcactgcacctctgcctcccgggttcaagtgattctcctgtctcagcctcctgagtagcagggattacaggtgcccgccaccacacctggctaatttttgtatttgtagtagagacggggtttctccatgttggtcaggctggtctcaaactcctgacctcaggtgatccgtccacttcggcctcccaaactgctgggattacaggcatgagccactgtgcccagcatatgtttttattaaaataataataataaaaaaaaatggccaggcgcagtggctcacgcctgtaatccaagcattttgggaggccgaggcaggtggaccacgaggtcaggagttagagaccagcctggccaacatggtgaaaccctgcctctactaaacaaacaaaaaactagctgggtatggtggcgcacgcctgtaatcccagctactcaggaggctgaggcaggagaatcctttgaacccaggaggcagaggttgcagtgagccgagatcgcaccattgcattccaatctgggcaacagggagagactccgtctcacaaaacaaaacaaaaaatcagccaggcgcggtggctcacacctgtaatcccagcgctttgggaggccgagatgggcagatcacaaggtcaggagttggagaccagcctggccaacatagtggaaccccgtctctattaaaaatacaaaaaattagctaggagtggtggtggcagacacctgtagtcccagctactagggaggataaggcaggagaatcagaggcaggagaatcacttgaacccaggagatgtaggttgcagtcagctgagagagcaccactgcactccagcctgggtaacaagagcaaaactccatctcaaaaaaaaaaaataaaacacacacacagaaaaaactttcaagtcaggtcactttcattacttattacttttactctcaaaaacatgtccccagaggtgagaggtgtatcatttcctgaagtcaatcccgcgccccaaactctccgcatgctttccctccatcaacaggcagagagatactagcatctgagctggggatgaccattacgagtccacagctgtttgaccattcttcttcataattgttgttacaactttttttcttccctgaagagatggcatctcgttcagtcatccaggttagaatacagtggcgcaatcgaagctcactgcagcctcaagatcccccaacctcagccgtctgagaagcatgcgttgtcacacctggctgttgtttttgttttttgttttgagacaaagtcctgctctatgaagcctcgctctgccacccaggctagagtgcagtggggcgtgatctcagctcactgcaacctccacctcctgggttcaagcaattctcctgcctcagccttgcaagtagctgagattacaggcacataccactgcacccggcattttttttttttttaaagacagggtcttactatgttgcccaggctggtcttgaactcctaggctcaagcatcttcccaccttggcctcccaaagtgctgggattacaggcacaagccactgcaaccggcataggacagattttccagctggaagccacttgttcacagttggtaaattatttctgagtcccaagggctgggagtagctgcctgaaatgctgcgctgggaagtgttctgtggctccatctggcactgttgcaagtgtgtaagtaagtcctacgtatgtgaatatctcatgccaatcctgatctagtcaaatcctaaacatatcataaagctagtaaatgttaaaagctgagtcacctaattctcactttagtaccataacccaaaagtcacaaatctgatttgatccttccagagaaaagacacatacgtgcccactttcagaagcattttcaaaaagtataacacttccaaagacaatacagcaggtccgtttccccaaaagaaactacagatagcctcaagcaacgcgacatatgttttatgtttcagcctaagaaacgttatctcttttttttttttttagatggagtcttcctctgtagcccaggttggagtgcaatggcgtatctctcagctcactgcaacctccgcctcctgggtttaagcaattctccggcctcagcctcctgagtagctgggactacaggagcccgccaccacgcccagccaattttttgtatacttagtagggacggggtttccccgtgttagccaggatggtctcgatctcctgaccgcgtgatccacccgccatggcgtcccaaagtgctgggattataggcatgagccaccgcgcccggcacagccttagaaacattcttaaaggaaccgcagctaaaactgacatcagactttgtttacaacctcctaccagcaccaccaccaccaaatgtaaaactatcctgtaatactcctatcacactaatttgtcctcttctccatccctgttcaacaatctaccatggatcaaaatgattctctagacagagaataaaatttcctttaaaatcaacaaacataacaaatttgggctcctgtatttaaagtaaacattaacacacactcaacatcacaattaagtttactaaaatactctgaagcgtttgcaatgaaaacctcttaagaataaaaacaggccgggcacggtggcttgcgcctgtaatcccagcactttgggaggccgaggcgggtggatcacaaggttaggagatcgaggccaacctggctaacacagtgaaactccatctttactaaaaatacaaaaaactagccaggcgtggtggcaggcacctgtagtcccagctactcgggagactgaggtgggagaatggtgtaaacccaggagacggagcttgcagtgagccaagatcgcgccactgcactccagcccggtcaacagagcgagactccatctcaaaaaaaaaaaaagaaaagaaaagaaaagaaaagaataaaaacagcagggcgcagtggctaacgcctgtaatccctgcactttgggaggctgaggcgggcagaacacctgaggtcaggagttcaagaccagcctgaccaacatggagaaatcccgtctctactaaaaatacaaaaactaggtagtcgtgataacgggtgcctgcaaccccagctaccctgggaagctgaggcaggagaatcgcttgaacccgggaggcagagtttgcagtaagccgagattgagccaccgcactccagcctgggtgtcgcagcaagactccgtctcaaaaaaaaaaaaaagagacccaagggccaacattcaatttctctacagaatcccagagggaaatgggaaaccagttcccttttagataaaatatttcaacaaagagaaaaacttcataaatacctactgataccatctggatttaaatacacttaacttcagccccctaaaattgaattgaatgaagataaaataaactgcttgctctccactcctcctgtcctcaacctttgaaacagtgtaaaggaagagctaaactaagttcccaaaatggaactccgtactgtagcaccatttcctataaaggcagcaattacaatttcatagagggcaggcggtgaatctaaattctagcttgatataacgacaagccaaggaatgtctaaagagagtacaaacaaatcctgcaactgaaagaggtgcctgtttcactccgtgcttgcttaccgtcaccctgcatgtctgaagtccatagtgtcagattatcacgtaacaactgcatgataagtgtagagtccttatagctttcttcactcagcgtatccagttctgcaattgcatcatcaaaagctgcttttgccaacctaaaggtatttcaatagaagtgttataaaaattaagtccaaaatcagaattagaaatgacatgctagacagcaatcttttcttcagttattccagtttgtaatagtcacaatgataatgcaaagaaaaagcaaatacaataaaaattaacttaaaggtatgtggaacactacttcttactatgctttaagcctgctactgatatgctataatatacatatcgactaataaaatacatagaacaacttccatcctaaaccatcaccaaaaaatatacctccaagttctaggcaatagttcacttatttcaaaaagttttgtttgtttgtttttaagacggagtctggctctgtcgcccaggctggagtgcagtggcgtgatctcggctcactgcaagcttcgcctctcaggttcatgccattctcctgcctcagcctcccgaatggctgggactacaggcgcccgccaccacacccggctaattttttgtatttttagtagagatggggtttcaccgtgttagccaggatggtctcgatctcctgacctcgtgatccaccagcctcagcatcccaaagtgctgggattacaggcgtgagccaccgcgcccagcctagtttttttttttttttttttttttttttttttttaagggattcgttatgttgcccaggctggacttgaactcctgcgttcaagcaatcttccgaaccttagcctcttgagtggctgggacaaacggtacacactaccacccccaagattttttaaaaaaaaaaaaaaaaaaaaaaaaaaaaaaaattttttttttttttttttttttttgggggacggggtctcgctctatcacccaggctggagtgcagtggcgggatgtaggctaaatgcaagctccgcctcctgggttcacaccattatcctgcctcagcctcccgagtagccgggactacaggcgcccgccaccacacccggctgatttgtttttatatttttagcagaggcagggtttcaccgtgttagccaggatggtcttgatcttctgacctcgtgatgtgcccgcctcagcctcccaaagtgctggattacaaggttgagatatttaacaaagtattaatgcaaaaagaaaatcttggacaatacctcaaagtttaaaaaaatttaatttcacgttaatggaggcagggaagcaaagaaaataaaaggcaacacagacgccatggaaatgtgattatgtaagccatttacagttttaaaagaaaatccacacttactgagtactgtgtactatgtccaacaaacgatacgatataccaatagaaaaaaaagagacataatctaagtccacatcaacttaaaaatttagaaatggagggtagacaaatacataactattttacaaggaggaggctggctgtggtggctcatgcctgtaatcagcacactttgggtggctgatgcgtgcgcgcagatcacttgaggccaggagttcaagaccagccgggccaccatggcaaaacctattaaaaacacaaaaaattaggccgggtgcagtggctcaagcctgtaatcccagcactttgggaggcagaagcgggcggatcacgtggttaggagatcgagaccatcctggctaacacagtgaaaccccgtctctactaaaaatacaaaaaaattagccgggagcagtggcaggtgcctgtagtcccagctacttgggaggatgaggcaggagaatggtgtgaacccaggaggcggagcctgcagtgagccgagatcacgccactgcagtccagcctgggcaacagagcaagactccgtctaaaaacacacacacacacacacacacacacacacacacacacacacacaaaattagccgggcatggtggcgtatgcctgtaatcccagctactcaggaggctgaggcagaagaatcccttgaacctgggaggcggaggttgcagtgaggtgaaactgtgccaatgcactccagcctgggcaagagagcacaaaaacaaaagaagaagaagaatgaagtgctattccaaataaagtatttcagggacccagaaggaggagcaattaaagggaaagtcaaatttgaactaatctcaatggataaggagaaaacaaaacacacttcaggtttaagcagaagcatgagcaaaggcatgcgagtgactttaaactggagctacacgtgggacagctagactggagtctgacaaggaaaggtgcaaccaccagtattagctaaatagccacagcttcttcagttacgatccctatctggacaaactcaactagccatttagaatgtttttacattggctgggcgcagtggctcacgcctgtaatcccagcactctgggaggctgaggcaggtggatcacctgaggtcaggagttcgagaccagcctgaccaagatggtgaaaacctgtctctactaaaaatgcaaaaaaaaaaaaaaattcagtcaagcgcagtgaagcatgcctataatagtcaacattaaagttccaatgtatcagttaatcccctttcctcaaactttgaaaggctttcacttaaaaaccctactttgcttaagcagttgtcctcaaacaaaccaaaaaaaaacacatacaaaaaccaaaaggggccgggcgcggtggctcacgcctgtaatcccagcactttgggaggccgaggagggcagatcacgaggtcaggagatcgagaccatcctggctaacacagggaaaccccatctctattaaaaatacaaaaaataggccgggcgcggtggctcacacctgtaatcccagcactttgggaggccgaggcgggtggatcacgaggtcaggagatcgagaccatcctggctaacacggtgaaaccccatctctactaaaaataccaaaaattagccgggcgtggtggcgggcgcctgtagtcccagctactcgggaggctgaggcaggagaatggcgtgaacccgggaggcagagcttgcagtgagccgagatcgcgctactgcactccagcctgggggacatagcgagactccgtctcaaaaaaaaaaaaaaaaaaatacaaaaaattaaccgggcgtggtggcgggtgcctgtagtaccagctacttgggaggctgaggcgagagaatcgcctgaacccaggaggctgagctttcagtgagctgagatcacgccactgtactccagccacagcagcagagtgagactccgtcaaaataaaaaaaaaaagcaaaaaaaccattttgctactgcaatatttactgtaaaaatttaaaataggctgggtgcagtggctcacgcctgtaatctcggcactttgggaggccgaggtggctggatcacttaaggtgaggtgtccaagaccagcctggccaacactgtgaaaacccatctctacataaaaatacaaaaattagctgggtatggtggcgggcgtctgtaatcccagctacctgggaggctgaagcaggagaatcgcttgaaaccgggaggcagaggttgcagtgagctgagattgcaccactgcactccagcctgggaaacacagcgagactctcctctcgggggaaaaaaaaaaagaaaaagacaatagcaaaaaacaacaacaacaacaaaatgccaacctacagaagaggagaaaatactcacaaaccatttacttgctaagaggttactatctggaataatgaactctcaacacttaacaaacgaaaaaaacatgaattcaaaaatgggcaaaagggcctggtgcagtggctcaggcctgtattctcagcattttgggaggctaaggcaagaggattacttgaggccaggatttcaagaccagcttcggcaacacagccagaccctgcctctacaaaacaaaacaacaaaaaaaaattttttttttgagacggagtctcgctctgtcgcccaggctggagtgcagtggcgtgatcttggctcactgcaagttccgcctcccaggttcacgccattctcctgcctcagcctcccgagtagctgggactacaggcgcccgccaccacgcccggctgattttttgtatttttagtagagacggggtttcaccacgttagccacgatggtctcgatctcctgacctcgtgatctgccctcctcggcctcccaaagtgctgggattacaggcgtgagccactgcacgcagcccaaaaaaaatttaaaaattggccgggcgcagtggctcatgcctgtaatcccagcactttgggagggaggctgaggtcaggagtttgagaccagcctaaccaagatagtgaaacctcgtctctactaaaaatgcccccaaaaattagccaagcatggtggcacatgcctgtaatcccagctacttgagaggctgaagcaccagaatcgcttgaatctgggaggtggaggttgcagtgagctgcgatcgcaccactgtactccagcctggccagcagagcgagactccatcttaaaaaaaaaaaaaaaaaagggctggccaagcacagtggctcacacctgtaatcccagaactttgggaggccgaggcgggcagatcacacgaggtcaggagttcgagactagcctggccaacactgtgaaaccccatccctactaaaaatacaaaaaattagccaggcatggtggcaggcgcctataatcccagctactttggatgctgaggcaggagaatcgcttgaacctggaaggcagaggttgcagtgggccaagatcacgccactgcactccagcctgggtgacagtgccaggctctccctcaaaaaaaagaaaaaagaaaaaaaaaaggaaaagaaaaggccaggtatggtggcatccacctctagtgacagctacttggaaggctcaggtaggcgaatcggctgagcccaggaagccaaggctgcagtgagctatgagtgcacaactgcagagacagaacaagatcctgtccggaaaaaaaagttacccacagaattttcagtcccaattccacctcaaggtgaagttaaatacaaggactcaagcaaatacttagtgcacccattttcatagcagcattgtactcaccatagggaaaaggtggaaacccactgaccaccaaaagtttaatgactaaacaatgtgtgcaaaatacataaaatgaattgtgtaaattcagtcactaaaaggactgaagctctgatccatgcttttacatggataaaaacattacgctagatgaaataaagacagccacaaaaggacaaatattatatgatcccacttacatgaggtatctagaatgggccaaattcatagtgacaacgtaaaataaaagttactagcagctagggagaggggaaatgaagttattgattgtttaatggctataattcgctttgtgtggggtgaagagaaagttttcaaatagtggtgattacacaacactgtcaatgtattcggtgccactaaattgttgtgtgtgtgtgtgtgtgtgtgtgtgtgtgtgtgtgtgtgtgtaaaagtctcgctttgtcgcccaggcgagagggagagggagacggggagagagagggagacggggagggggagggggggaggagggggagggggggagagagggggagagagagagagagagatttgaaaaaaagtctcactgtgtcacccaggctacagtgtactggtgcaatcgaggctcaccgcaacctctgcctcctgggttcaaacaattctcctgtctcagcctcccgagtaactgggattgcaggcatgcaccaccacacccggctaattttgtatttttaatagagacagagtttcaccatgttggtcaggttggtatcgaactcctgatctcaggtgacccacccacctcagcctcccaaagtgctgggattacaggcgtgagccactgcacccaggctatcacaactttttaaaagtaaaaagttatgtacgtataaatattccttacatatttatctacattatcaaaaactgggaacaagctgaagtataaatgggggaacagtttaacacacattagtaagactgaaacttgtttatgctaaaacagaaaatataaaattatgtttgctacgagagtaactattaaaaacatgcccatagaaacagaacactggctgggtgtggtgactcatgcttgtaatctcagcactttgggaggcgaaggcgggcggatcacttgaggtcaggagttccagaccagcctagccaaaatggtgaaaacaccgtctctactaaaaatacaaaaaaaattagttgggcatggtggcaggcccctgtaactccagttactcaggaggctgagacaggagaatcacttgaacccaggaggtgaaggctgcagtgatctgagatggcgccactgcactctagcctgggagacagagtgagacatggtctcaaatttaaaaaaagactgaaaactaatataacaaaaattaaaataattctaattcctctcatttccttcctctactcattttaacatgttagatttcaatctaccagcaacaaaaatatcccacatcaaaataattatgctgactgctatgctagtgggttgagacaggtctgttttaatactatccaaagtagtttcagtaagagccaaaagaattactatgcagccaagtctacaaagacaggcccaagaaacaacacggaaaacccaaacagcgccccccttaactttcacgctgagcgctgctgttcttccccacaacttacctgcaggcacggtcaggggaattaagaatttcgtagtagaatacggaaaaattgagagcaagacctaagcgaataggatgcgttggtggaagttctgtcattgcaatatcactagcagctttataagccactaggctgttctccgcagcctccttcctgtcgtttcctgtggcaaattctgccagatacctgtggtagtcccctttcctaaaacaaaaccaaaattaaaaaaaaaaaaaaaatttaaactaggaacgatttttaaaggaaaataagctaaaattgttctatattatataaaatgtgacaaaaatatatgtaacaattaggtgtacttcaataattttaaacactctcaggaataactggcttcgtttcatttttttccttagacatttcatattactaaatataagcaaaaatcccaggaaattaactgaggagcctctaaaaattaataaaattatcacctgatagaccagaattaaacaagcaagtggttccaaggaatggcatgacagtttattaatcataaaataaaatgtctatatataacactaagcactgtgaaatgtatgccgtttgggggaggggaatgggataggtctcacaaaaacaaaagaatataaataagcaaaagctaatacattttcataatagcccaaccaccttttcattacaatattaactatccttctaacattgaacaattattcttaaataaaagttgaaaacctacatagaacaaagttatggttctaaaaggaccaactttcaatcttacattttcccttctagtatagaacctacattttataatagaaaaccttggactcgccagtgttagctgctggaatgaggtgtttgtccagtacatccagaatgtcacaacagattaactttagctcagtctcaacctaaaaaaaaaaaaattttttttaaatcagattaagtctagaaattctacaaattattacatattctatctctggttttgaggtagagagcttagtattaaaaagaatttgtatccctctccaaactcccttcttccttcttgacacaaaagcagagaaaagctgcctctaggttataaaaagtatcttttcccttctgcatgctgcctattgttacacacacacatgcaggcacgcacacacgccagcccccacacccccttcacagtaccacagtacagctacagaattaccaatgactaaaactgaacactgatgcttcttggtaaatgctggtcaattacatgaattaccttctttcacaaggtagcaacgtaaagacattgctctaagatcaacaattaaataagaatttaataagcagagctaggatttgaacccaggcaggctgcaagggacagaatcaaaatttaaacccaggcagtttgccttcagcactcacatccttaacaacattcaccaggcaattcctttagtggcagagatccgtaactattaaaacaccgaaaacctatctaccaaagtagctactgccacccatctctatccactgatcatgctgaacacgcacaccacctctcaacgcacatcctcagcttgcttcctgtttgctattaactcatgcagcactactgctgaacctttcatgagggtcctctccgtgcccctggaacctccgtttcactgcagaaaattctctctttttcttctataatcacatccttatcccaagcaaaactactttctgaataaacgacatccctgacagcttttccaatagagactggtctaggagaaggaagacttctaagttctcctagctccttgcatactcaatgactgctctattactccaaactcttcctcctcacaagctgatgatctacattctatttctcagtttttgtcatcaatagatctctacacccttctcccagattcactgagtatctacagcaaacccacccaatacctgagatcacaccaaggtatggtgcagccatgttccattcaacagagttctttgctctctactcctagactttcacttgtccacacccatgaccatgctgctccatactagaagtctgaattgcaacactccactcttggcccgtggcttcctttttcagttcctcttctcttattatttctatttagggactcatcaggacatctggactctttattttttactttttctttctttgattcagagtttccctcttgttgccaaggctggatggagtgcagtggctcgacgttggctcattgcaacctccacctcctgggttcaagcgattctcctgtctcagcctcccgagtagctgggattacaggtgcccgccaccatgcctggctaatttttgtatttttagtggagacggggtttcaccatgtcggtcaggctgctctcgaactcctcacctcaggtacctgcccgccttggcctcccaaagtgctgggattacaggcatgagccaccacggaaggccccagctcacaactttctatgtgacctcaggtatgtcaaacacccaaaaccctggtttgtgcattcatagttgggataatacctcccccttccagtgccattttaaagatttcatgtactaccttgcacaaatacatgtaacaaaaatatttctctactcaggacagtgcccagtacagctggcgagtcagtaactgtggttcccccacccttccctcccccaaccaacctcactttccacctgccctgtaattctcttccctgttctttcctgtatttacgtgcctgtctcttctactagaatcggttactcaacagcagcactcccgacagtttgttgtggggcccgtgctgtgcccagtagaatggttagcagcaccccagtccccaccccactagatgctaggaacaccctccagaagttgtgacaatcaaaagtatttctagacattgttaaacgttctctgaagtacaaaagcacctctaattgaaaactgctgcattacagtgatggctgtccaacttttttttaacaagacctacaataagaaacattttatatatgtatatacacccacagtaagtaaaataacttcattaaataatcctcagggaaaaaaaaagaggaatcagacaaattaacccaatatattggtttttgggtgcttttttttttttttagatggagtctcgcgctctgtcacccaggctggagtgcagcagtgcgatctcggctcaccgcaagctccgcctcccggattcacaccattctcctgcctcagcctcccgagtagctgggaccacaggctcccgccaccacgcccagctaatgttttgtatttttagtagagacggggtttcaccatgttagccaggatggtctcgatctcctgacctcgtgatccgcccacctcagcctcccaaagtgctgggattacaggcctgagccaccgcgcctggccaacccaccatatttttttaaaaaacagtcatcattttgcttgaaaatacaatagttcccccttatccaagagggatccattgagacctgccagtggatgtgatgaaaccatggaaaataccaaacctgatacagactatgttttgtcctcatgcatagccacgggtaagtttaacttataaaccaggcacaaagatcaatatcagaaacattataacatactgtaatacaagttatatgaatgtagtctccttttctctcaaaatcttaagtgtaccgtcctacaggtaactcaaactgtggataaggggggatgatggcacaacaatctcaccatttgccgatattcccgaatcatttttagcttgtcttctcctcccttgttttcttctttctgttcaatgctgctgattattctccaggaggctcttctagctccaatcacattcttatatgcaacagataggaggtttctttcttcaactgtcagctccacatccatccctgctactttcttcattgactccaccatttctgtatgggaaaaggaaaagtcagaccttacaaatttgaagttttcttaacatattcctttcaaagtagtttttttctgtcaagctactgcgaaaaaaacattttaacaaaaataatttcataatcatcaaaactaatatgagtaaaaagccaaaaacatgtaaaggaaaccaaactaagagccaatacaaagactccagaaggtagttaggtggagtgagaaagacttcatatactatctaatataatttagtgtggtctgaaagcacctctcattaaataaggtaattaggcacacctaactattttccagcaaaaaaaaatgagctgtcagtttaagagaaagattaagaatttacaggttctaaaatgtattgtctcacaaataaatagtatttccaaaaatacaaaaggaaggggaatttgttcatacagcaaaaatatacggagtatatggttggccaccaacagactttggatgttttctatccttcctcgtatgaagctccttcattggtaaaacttctgatgattcctacttgttaccactaggtggcgagcaaagaaaggggcccagaaaagccttggcatctaccgcaagcatagggaaacacaacggcgtgtgaatgcaaagcgccacaaacagcacaagaaatagtaactgaataaatacattaataaaaacttatttttgatgccatattaccatgtggctctccaacattacccacgtttcaatctttggtgatgagactcaagaatctgcattttagggccaggagtaagtggctcatacccctagcactttgagagctgaggcaggagaatcactcgagctcaggagttcgagaccctgtctctaaaaaataaaaacagaggctgggcacagtggctcatgcctgtaaatcccagcactttggcaggccgaggtggcacatcaccaggtcaagagataaagactatcctggccaacatggtgaaacactgtctctactaaaaatacaaaaattagctgggcgtggtgatgcacgcctgtagtcccaggtactctagagactgagacaggagaatcgcttgaacccagaaggtggagattgcagtgagccaagatcatgccgctgcactccagcccagcaacagagactccacctcaaaaaaaaaaaaatagaataaataaaataaaaataaaaataaaaataggctggatgtagtggctcatgcatataatcccagaactgtgggaggccaaggtgggcagatcatttgaggtcacgaattcaaggccagcctggccaacgtggtgaaacggtctctactaaaaatacaaaaattagctgcgtttggtggtgcgcgcctgtaattacagctacttgggaagctgaggcagcagaattgcttgaacccaggaggcagagattgcaactgagatcgccccactgtatgccacctggggcaacagagcagactccatctcaaaaaaaaccaaaagaaagaatctgcatttaaataagcatccttagctttcattaacaccctaagcataagcataccttaactaataggtatgaaagagatggtgacttcataaaacactactaaattggacgggcacggtggatcacacctgtaatctcagcactttgggaggccaaggtgggtggatcgcctgaggtcaggagttcgagaccagcctggccaacatggtgaaacccgtctctactaaaaatacaaaaattagctgggcatggtggtgcacgcttgtaatcccagctaccaggaaggctgaggcaggagaactgcttgaacctgggaggcagaggttgcagtgagctgagattgcaccactgcattccagcctgggtgacagagtgagactccgtttcaaaaaaaaacacaaaacaaaaaccaaaacactattaaattaaggggagtgtgcctaatgtatccaggaaaatatgtttcaaaaattaatcctttcgggaatataaaaaaaattaagccatattttgtaaagtctcttcgaaaaatattcggcaatgttttaataaacatgtaccatatgactcagcaatcccaattctatgcatcatccagaagaaaaataatctttacaaagacttttacacactcactcacagcaactctattcataatagccaaaaagtggaaacccctcaaatgtgcatccagaggggaaatgtataagcacactgatgttcacatatgtaagatgggataccactcaaaaataaagaattaactgtccatgcacagtggctcacatctgtaatcccagcatttggggaggccaagacaggaggattacttgagcccagtagtttgagaccaacctgggcaacatggtgagactctgcctctacaaaaattagctgggtgtggtggtgtgtgcctgcggtctcaactactcaggagattaaggcaagagaactgcttgaccccaggaattcaggcctgcagtgagctattaggttggtacaaaagtaattgcgcattttgccagcaaaaaccacaattactttgtataatcctaacgctgtactccagcttggatgacaaagcgagagactctgtgtccagaaagagaagaggagacgggaggggagaaaaataattaactgatacaagcaacaatatggaagaatctgaaaaacatcatattaagtgaaaagagtcagattaaaaggattttatcattccatttatatcaaattgcaaaaaacacaaactaaaaagacagaaagcaaatggttatcaaggtacagaggtgaactgaggggcttttgtgcaaaggacaggtcacagaattgtacatgtaaaagtggcacgtttaactgtacacctcaagctgattttttaaatgcaattctgaaccattaaagaaggatgacatgttgggtgctgtggctcacacctgtcatcttagcactttgggaggctgaggcaggtggatcacctgaggtcaggagttcaagaccagcctggccaacatggtgacaccccgtctctactaaaaatataaaaattaggccaggcacggtgactcacgcctgtaatcccaacactttgggaggccgaggcaggcagatcacctgaggtcgggagatcgagaccagcctgaccagcatggagaaactaaaaatacaaaaaaatttgccagacgtggtggcacatgcctgtaatcccagctactcgaggctgaggcgagagaattgcttgaactcgggaggcggaggttgcactgagtggagatcgcgccactgtactccagtctgggcaacaagagcgaaactccatctcaaaaaaaggaaaaaaaaagaaaaagaaaaatacaaaaattagccaggcatggtggcaggcatctatagtgccagctactcgggaggctgaggcaggggaatcgcttgaaccccggagacaggggttgcactgagctgagatcgcgccattgcactccagcctaggcgacagagtgagactctgtctcaaaaaaaaaaaaaaaaaagtattacaatatggtaataagaccactcattaattcatttgtaggagtctgaaagcattcatctaaaacatgcccaattttgttttctaaaccagtcacgaaacagtctaaatttagaagcagtggaataggtaatcgtacctccatactagtttaattctcaaaaatcagcaagtcaaacataactcagaggtaagcctgtaattaaactttctaaactgatcgcaaagtaaatcttaagtaacccagctacacaaaaacagtgccattaattcttttaaggctttacaatattacatacagaaaaactatgcagacatcaaatactaccaaaaatttaagttacatatctcgaatatcattccttatgatttaattttgttcaaatttctgtgctttacaaattttcaacaacgaagacttagtatttttataatgcaaagagaaatatatttgtaacactcagtgatactctactgttccagattcaagcataaatgctttcatttttacatatacacaaaacaatgcacagactgtgtggtaaaattatagaagcaacaattatccctttaataatacctttatttatatataattcccctacctaacaattcacccatttaaagtgtactattcggccgggagcaggggctcacccctgtaaaccttgggaggccgaggtgggtggatcatgaggtcaggagatcaagaacagcctggccaacatagtaaaaccccgtctctactaaaaatacaaaaattagctgggcatggtggcaggcgcctgtagtcccagctaaccaggaggctgaagcaagagatttgcttgaacccgggaggcggaggttgcagtgacccgagatggctccactgcactacagcctgggtaacagagagagactccgtctccaaaaaataaataaactgtaccattcaatggtttttagtatattcacagaattctgcaatcatcataattttagattttcatcacttcaaaaagaaaagccccaaacccattaaccatcaattcccatgtacccgaaccccagcccggtcaaccaccaatctattttccgcctctacacacttgtctcttatgcacatttcaggtgcgggcataccttggaagatactgcgggttcagttccagagcactgcaaaaaaaaatattgcaataaagcaagtcacatgaatttttgtgtttcccagtgcatagaaaagttatgtttaaactacactgtaatctattaagtgtacaacagcattatgtctaaactgtacataatttaaaaacaccttattgctaataaatgctaatgctcatctgagccttcagcaagtgataatattttgctgttggaaggtttttgccttgatgttgatggctactgactgcttagggtgatggctgctgaaggctggagtggccgtggcaagacaatgaagtctgccatgttgatgggcttttcctttcctgcatgatttctctgtagcatctgacgctgttggacagcatttacccacagaaaaacttttttttttttttttttttttttttgagacggagtctcgctctgtcaccaggctggagtgcctgggcgtgatctcggctcactgcaagctccgcctcccaggttcacgccattctcctgcctcagcctcccgagtagctgggaccacaggcgcccgtcaccatgcccagtgaatttttttgtgtgtatttttagtagaggcggggtttcaccatgttagccaggacggtctcgatctcctgaccttgtgatccgcccgccttggcctcccaaagtgctgggattacaggcgtgagccaccgcgactggccagaacaactttttgttttttgtttttgagacagtgtcttgctctgtagcccaggcagtggcacaatctcggctcactgcagcctctgcctccagggttcaagcaattctcctgcctcagcctcccaagtagctgagactacaagtgggcgccaccacgcccggctaacttttctatttttagtagagacggggtttcagcatgttggtgaggctggtcttaaactcctgacctcaggtgatctgcctacctgctgtgttaacaggcataaaaacaacattgcaggctgggagcggtggctcacgcctagtaatcccagcactttgggaggccgaggtgggcagatcacgaggtcaggagatggagaccatcctggctaacaaggtgaaaacctcgtctctactaaaagtgcaaaaaaaaatcagccgggcatggtggcgggcgcctgtagtcccagctactcaggaggctgaggcaggagaatggtgtgaacccgggaggcggagctgcagtgagctgagatagtgccactgcactccagcctgggcgacacagcgagactccttctcaaaaaataaaaaatcaaaaaacattgctctccttacacaactacatcagagctccagggtgaccaagtactgtgtgtgagtgtgtggtagtgtgtgtgtgttttgaaacagagtcacactctgtcacccaagatgatacagtggcaccatctcagttcactacagcctcaacctccccagctcaagcgatcctccaacctcagcctcctgagtagctgggactacaggtgtacgccattacgcccagctaatttttattatttttttgtaaagacagggttttgccatgttcctcaggctggtcttgaactcttgtgctcatgtgacccacccatctcggcctcccaaagtgctgaaattacaaatgtgcaccactgcacccaacctcggtgcattttcaatgtgcagtaatacattgaagggaattttttttttttctgagtaccaagcttcaacagtgggcttaagatattcagaaaaccatgctgtaaacataagtgctgtcttacaggctttgctgttccatttataaaccaggcagagtaaatttagcatgattcttaaagaggcctcaaatttttcaaacagtcaatgagcactggtttcaatttaaattcaccagctgcattagtccctaagaagctgcatcagcctgtcctatggagctagacacactgacttctctctagttaagtgaagtcctagacagcattttcttctaacacaaggctgttttgtctacgctgaaaatctaagtggtgtggtcaccatcaataatgttagctaaatctggataatttgctgcagcatctacatcagcacatgctacttgaccctgtactttttttttttttttttgagacagaatttcactttgtcgctcaggctggagtgctgtcacaacgtctcagctcactgcaacctccgtctcctgggctgaagcgattctcctgcctcaacttcccgagtagctgggattacaggcgtctgccaccacgcccagctaattttttgtatttttagtacaggcagggtttcaccatgttggccaggctggtctcaaactcctgacctcgtgatccgtccgcctcggccccccaaagcgctgggattacaggcgtgagccaccgcgctcagccgaccttgtactttttaagtaatggagatggcatctttccttaaaccttactaaccaacctctgctaggttccagctttctatctgtagctttctcacctctctcagctttcttaaatttgaagagagttagagggttggtctgaattaggctttggcttaagggaatagtatggcaggtttgatcttctattcagaccaccaaaactttctgtcagcaagaaggctgttttgctttctcatcattgctgtgttcactggactagcactttttaatctccttgaagaacttttcctttgcattcacaactgtggtgcaagaggcccagctttcagaccgtgtctcggcttttaaggtagccttcctgactcagcttcatcatttctacctttttatttaaagtgagagactgggactcttcctttctcttaaacacttagaagcaattgcagggttgttaatcggcctaatttaaatattgttatgtttcaggtaataggtaagcctaacgggagggagagagacagggagtcagaacacaaacaagagctcacgcctgtaatcccaatactttgggaggccgaaggcaggaagatcatgtgagcctaggagttcaagaccagcctgggcaacaggtgagaccctatctctacaaaaaatacaaaaactagccaggcatggtgatgtgtgcctgtcgtcccagcttctcaggaggccgaggcaggaggattgctggagcctgggaggtcaaggctgcagtgagcattcctgcctgggtgacagagtgagaccctgtctccaaaaattaatagtaaaagaacacaggccaggcatggtggctcacgcagtaatcccagcactttgggaggccaaggcgggcagatcacatgaggtcgggagttcgagaccacctgaccaacatggagaaaccctgtctctactaaaaatacaaaaaaattagccaggcatgggggcgcgtgcctgtaatcccagctactcgggacgctgaggcaggagaatcgcttgaactcaggaggcggaacttgcggtgagccaagatggcgcccttacactccaacctaagcaacaagagcgaaactcagtctcaaaaaacaagcaaaaaaaggaatacacacatctatcaattaatttccctcagttcacggatccccaaaacaattacaatagtaacgtcaaagattactgatcacagataaccaccattaacatgtaatgaaaagtttgaggccgggcgaggtggactcacgcctgtaatcccagcgctttgggaggccaagaagggtagatcacaaggtcaggagatggagaccatcctggctaacacggtgaaaccccgtctctactaaatatacaataaaaaattagccaggcatggtggcgggcgcctgtagtcccagctactcgggaggctgaggcaggagaattgcgtgaacccgggaggcggagcttgtagtgagtagagatcgtggcactgcactccagcctgggtgacagagtgagacttcatctcaaaaaaaaaaaagaaaagtttgaaatactgcacaaggtaccaaaatgtgaacagagacaagaagtgagcacctgctgttggaaaatggcaccaacagacttgctcaaagcgggttccagaaaccttccatttgttctgtaaaaatgtagtatctgtgaagcacaatcaaacagggtgtacctacgaacagagccatacagtatggagcctcccatgactggcttctttcccaacacaacctaccgtatggagtcggctgtgactggcttctttcccatagcatggtctcaagtttcatgcctagtgtagcatgcatcagtacttcacctactgtatggatatactatgctttaaaaatccattcattaggccaggtgcggtggctcacgcctacaatcccagcactctgggaggcaggtggattacctgaggtcaggagttcagaccagcctggccaaaacatggcaaaaccccgtctctactaaaaatacaaaaattaggctgccatgatgtctaggcgaatgtctgtaatcccagctactcgggaggctgaagcaggacaactgcttgaacacgggaggcggaggttgcagtgacccgagatcgtgccactgaactccagcctggcaacagagcgagacttggtctcaggaaaaaaaaaaaaaaatccattcgttagttaatgaacatttgggttgtttccatttttggactattataaacaatgctgctacgaacgttctttaagtttttgtatgaataaatgctttcagttcacttcagtatacacctagaaggaacttcaggatcacatggtaactagctttttgaggaaggacatcccaaacttttctacaggagcggcaccgtttttacactcccaccagcaacacaggattctaatctggccacgtcctcaggaacacttgttagttattctttaaactagtcatcctagtgggtgtgaagctgtatctctttgtggttttgatttgcatttccttgataactaatagtgttgaacaccttttcatgtgcttatgagccttttgcgtatgttctctggagaaatatctattcaaacactttgccaaatatttaattatttgtcttttcattattggtatgtaggagttgttcatttttaaaaccccactgactcctcttaattcccccaaccccctctgcatcccttaaggtagcagattaaggaacagaagtagcattgagtcaggagacacttctattgcttcaagagacagggtctcactacgttgccctgactgtatgtcgtgcagtggctattcacaggcccatgatcacagcgcactatgtagccttaaactcctggcctcgagtgatcctcccacctcagcctcccaagtaactgggactataggtgcacactaccaagcacatcactccttcaagagtatggaaagtcaacttctcaatctctccaaacattctacgaccagtgctttgtaccagtttgtacaaataacgactacaatgacactctcttccaatatcactgtcatctttatccttttaacaccagcaacagaaacataatactaatgataatgtaccccaaaactatataagaaaagctgatttatccaaaactctagactaactacacccttcagccctccctcagtagaggatgaactccaaccattatattcacataaaggccctcaacacaactagcatttcctgaaatcacctttgcggcaagtattttatcagtgggatgtgggcatttcacgggtgggggaaggctgtcatgtgtttgcagcaggtgggatcgcaatttaagaaccaaaaaactgaaatggttgaaatcacttcttttggatccacgggcagttttgctacagtaattttgagtaacaaaatcgaatttctgggacttttcatggtttggggacaagggtgggtgattaaaatcgccactctgaaaaacatactcctcacaagttaattaaacatagttaagtctctttagttccaagtaagtttcccttcattgtatggtaatagcctagacacagatccaccacatggaaccagcttgtgtctgggacacccatcatctgctgctgccagtagagtcacaagtttttccccttgacttgttaactgaggtttggtttgtggttgtgttctttcaactatgttgttcattcaacagactaattcataaataaaacaccccatttcaactatgttgttcattcaacagacttattcacaaataaaaccccccatgctaaaataggcactgttccaaatgcttcgctgtattaatgtgcttaatcttctcaacagacctctgaagtgggtaccagtattatcccattttagaatatctccatatactgaagaacacgaaggttaaacttgttccagatcacaaagccagtggactacaactcagggaatctgacttgagttgtgctttgatttaatcatattgcctcagatttgaatatttatttgaatgcatctgtacgaggatccttttgtttgcttctgtgacaatagaggggaaataactggtttcagtgactctaccagagaaacaagtttcacatactaaaatgtggttgagacccaggcatggtggcgtctgccaccatgagagaaagaacgaagacagaaagacagacagaaagacaagaaagacagacagacagacagaaagaaagaaaaagaaagagagagaaagaaagaaaagaaaagaaggaaagaagttcactcctgcttaaaacgcatttctttttccacctagaggttcacccctctcccaaaaaaagcttactttattcttttctcttaaagagacgggagtctttgtatgttgcccaggctggtctccaactcctgggctcaagcaatcctcccacctcagcctcctgaatacaaaaagcttagtttcatacctctaatatctttacatcaacatcccagtaaacctgattttcccaagactgtccttgccaggtagtaaaacaagtctctgctgagcttcaacagtttctgataaacacaaagtacaaaatcataaaaggagcaggtctccaactatcaggctgacaagtcacaaggcacaatttacagctcctaatgaaattcagggtcaggaaaaaagcaaactgttcagaatctgccatgggaaaaacgagcaggttctgtactggctgacaggattaatgttcctcttaccaaagcacacagggtcataaccctaacttttttttttttttttgagacagagtctagctctgttgcccaggctgaagtgcaatctcactgcaacctccatctcccatgttcaagtgatgctcttgccccagcctccctggtagttaggactacaggtgcccgccaacgtgcacggctaatttttatatttttagtaaagacagggtttcaccatgttggccagactggtttcgaactcctgacctcaggtgatccacctgcctcggcctccctaggtggtgggattacaggcaggggttaccacacccggccctaatcctgattttaagggcagaaaaatgaagctaagagtaatgttcctaaagtcacacaatggtaaaacccaaactcaaacccagacaatctaacttaagagtctgagcttttagccatcacacttcaatgactttgcaaccagagtgctcacagaaacaaattccttagcccaagaacagtaaaagcaatcacaccaagggaagaaaagggcacagcatcaggcactgacataaaaaggttctgtcagaaccggaaatgtggctcacacctgtagtcagtcccagctactccagaagctgagacaggaagatcgcttgagcccaggagtccgaggccacagtgagctatgatcatgccactgcactccaccctgggcaacagagcaagactctgtctctcaaaaagaaagagttcagtcacttaggttctggaaaggtcctgagcttgctttatataaaggctaatcaattagccaatgacctttcctttttcctaggaaacatcatccctctggatcaaactcaaatgtcttactatgtaaagacttcctggctggaagcagtggctcatgcctgtaatcccagcactttgggaggccgaggcaggtggatcacctgaggtcaggagttcgagaccagcctggccaacatggtgaaaccccgtctctactaaaaatacaaaaattagctgggcatggtggcgggtgcctgtaatcccagctactcgggaggctgaggcaggagaattgcttgaacccgagaggcggaggttgcagtgagccaagatcgcgtcactgcactccagcctgggcaacagaggtgagactccgtctcaaaataaaagtctcaaattgtttttatggtttggaggggatagtatgcaagtttgttggagagaaacttacaaggtgctacttactaagaaatttaccttgcggatattttcttaaaaaggagtcatcacagaaaatgtatgcctagatttacatgtgagaagcagtcttcaattggatacttctgaccccatgaaataactgaggacatttctgcagaaggctgacatatgagaatgctcaggaattgtgtggctttcaaataatctgattcagcttggacaacctccaaggaatgaataaaattaggcaaaagcttgacaatcactaaacatagtcaattcacagataattcatgacaatcaacattctgccttactgatttctaaaaggtcccaatatcttgctagtcacatgacaactctcttgttactattcagaaatataaagatggagcaaaattttttctaaaacgattatcacgcaccttctctatcacactgacaaataatctgggaagcatcagttctgtactaaaaagcatgtctaaaaagcctgactcagaccatttcaggagcaatactactcgtttactataaaagaaattcagtacaggccaggcacggcggctcacgcctgtaatcccagcactttgagaggccaaggcgggtggatcacctgaggttaggagttcaggaccggccttggccaacatggtgaaatcccgtctctactaaaaataccaaaaattagttgggcatggtggcacacacctgtgatcccagctactcgggaggctgaggcaggagaatcgcttgaacctgggaggcgaaggaagttgcaatgagcaaaggtcatgccattgcattccagcctggcgacaagagcaaaactctgtctcaaaaaaaaaaaaaaagaaattcagtatgatccccaagaaagttacaaaacattctcagatggctaacctgaattatactggtttttaaacattaaatctctgcccaaatttggcaattttaattttatcataattaattcagctgcttgaagcctgcttaaagtttgcgatgtcatcactttaaggttgactatactcatgtcagtgtacttccaaatcacctaagagccctatgggatgttaagacacacttcagattttacatggcctcacgcctgtaatcccaacactttgggaggatgaagcgggcaggctgcttgagctgaggagtctaagcccagtctggggagcacggcaaaactccatctctactaaaatataaaaaattagccgggcgtggtggcacacacctatagtcccagctactctggaggctgaggtgggtggatcaactgagcccaggaagtcaaggctgcaatgagctgtgatcacgccactgcactccagcctgggcaaagaaagcaagactctgcctcaaaagaagatttcatacatgcaaaacttctaattcgaatgacgaaaaaaactatcaactacactaattctaatagtaaataacatggaaagaatctaagaatgtaacaaaatgtcaaatctgtagcttgaggagtcttaaatcatattttcttagaaaaacaaaatgcaagaatagtgatcactagttctactcaattaagatgagcaaaaggctgggatgtaccctggagcgtgttacgatgagttatgaaggaaggagtacttgaggtaaacagttggacaagatttaggaaacactcctggaacttgttttaatttaagcaaagatttaaaattgtgtaaaatgaacaggattagttggttgacatgtaaattatactttgtgttcagtacggtgaaagaaccagaatgctgtaaacagaaaataatggaagtactcagaagcttttctgaagaggccctattctagtctactaactttgactattattgtagtacccacataccacgtgcacttttattagacaaaaatgacacacactttgggaaacagcacaggaaagtcccaccacagcacagcaaacaccacacttacagcaaagagtttcagactagaagactagacttttttttttttttttttttgagacggagcctcactctgtcgcccaggctggagtgcactggcacgatctcggctcactgcaacctccgcctcccgggttcaagagtctcctgcctcagcctccgaagtagctgggattacaggcgcacactaccatgcccagctaaattttgtatttttagtaaaggtgaggtttcacgatgttgaccaggatggtctcgaactcgtgacctcaggtgatctgcctgcctcagccttccaaagtgcgtgagccaccgcgcccagcccagactagattttcattcctgcttattcatatgctatttgacctcaagtatgccacataatctctaggagcttgttcctcatccataacatggaggatatccagccctgagttatgagagtttaaaatgagattgtagagtaaattgtctggcatataatatgaattcaattaaatgtttaatttcttttcttcgcctcacttccaagattaaataacaaaaaaacaaaaccggaatccagacgggtgggggtgttaatgtgcctgatgtaggaaagagctaaataaagaacacagcgtttagaatctaagtctaataaagccttttgcagaatacagctccattttttctaacccagactttccattcttacatctcatatatttaatcccatatctgtgcttttggtaacatatccaaagaacctcactctcccaacatccaaatcttatcccccaattaatgtctcacctactattcaagttttccccgacaactgcagcacacaatcccttgttccccttctctacaattcctgtattatacaagctagaaatcatcattctggtttctagccacagcttgcctgattagactgtaactcttccatagtaggtattataagtaacgattttattactcacaaggggaaagttgttccccatacatgctaaagaaatacatattgattaaatggtccaagaggctgggcgcagtggctcacgtctgtaatcccagaacttcgggaggctaacaatcacttgaggtcaggagttacagactggcctggccaacatggcgaaaccccacctccactaaaaatacaaaaattagtccgggtgtggtgggattacgcctgtaatcccagcacttttggaggctgaggcgggtgactcacctgaggtcaggagttcgagaccagcctgaccaacatggagaaaccccgactctactaaaaacacaaaaaattagccaggcgtggtggctgtaatcccagctactcaggaggctgaagcacgagcatcccttgaacccgggaggtggaggttgcagtgagctgagattgtgtcactgcactccagcatgggcaacaggacaagactcatctccaaataaatcaataaactcaaaaaaataagtaaataaaacacgaaaggctcaagaatgcatgtaaaggggggaggggaatttcaaactatcaactaatcaaaacgtaacataaatgcactgaggaaggccgagcgcaaaggctcaggcctgtaatcccagcactttgggaggccaacgcgggtggatcgcttcaactcaggagttcaagaccagcctaggagacatggcgaaaccctgtctctacaaaaaaatacaaaaattggccaggcctggtggtgcatgcctgcagtcccaggcataggactgaggtgggaggatcactggaacgtgagaggtcaaggctgcagtgagcccagactggcccactgtactccagcctgcacgagagagcgacactatgtcaaaaaaaaaaaaaaaaaaaaaaagacaggcagacagaaaaggaaaaaaaaacacagatatataggcactggagcaaagaaaaagttattaaaggagactcaaaccactgacaagttacttgcggcataagtagtagtttttttgtttgtttgttttgagatggagtctcgctctgtcacccaggctggagtgcagtggcgcaatctcggctcacggcaacctccgcctcccgggttcacgccattctcctgcctcagcctcccatgtaactgggacttcaggcgcccaccaccatgcccggcaaattttttgtatttttagtagagatggggtttcaccgtgttagccaggatggtctcgatctcctgacctcatgatctgcccgcctcggcctcccaaagtgctgggattacaggcttgagccaccgcgcccggccttttttttttttttgagatggagtctcactctgttgaccaggctacagtgcagcagcgcaatctcagctcactgcaagctctaccggcaagctccgcctcccgggttctggccattctcctgcttcagcctcccaagtagctgggactacaggcgcccaccaccaggccaggctaattttttttttgtatctttagtagagacggggtttcactatgttagccaggatgatctcaatctcctgaccctgtgatccacccgcctcggcctcccaaagtgctaggattacaggcgtgagccaccacgcctggccagtagttttcattatttacttgatatggctgtactgctgactttacatttaaattcatcttttgcagtaagaaatgaaaaacaggccaggtgcggtggctcatacctgtattcccagcaatttgagaggctgaggccagcggatcacttgaggtcaggagatcgagaccagcctggccaacctggcgaaaccccatctctactaataatacaaaaattatccaggtgtgttggcatatgactgtaattccagctacttgggaggctggggaaggagaattgcttgaacctgggaggctgaggttgcagtgagctgacctcatgccactgcactccagcccaggtgacaaagcaagattccgtctcaagaaagaaaaaaaaaaaaaaggcaaaacaaaagtggaaaaactggctggtcgtggtggctcacgcctgtaatcccagcactttgggaggccgaggcacatggatcacctgaggtcgagagttcgagaccagcctgaccaacatagagaaaccccatctctactaaaaatacaaaattagacaggcatggtggcgcatgcctgtaatcccagctactctgggggctgaggcaggagaattgcttgatcctgggaggacgaggtttccgcgagctgagatcgcgcgattgcactccagcctgggcaacaagagcgaaactccgtttaaaaaaagaaatggaaaaactatttcacatactgtttaacttttttttttttttttgagacggagtcttggtctgttgccccggctggagtgcagtggcacaatttcagctcctggcaacctctacctcccgggttcaagcaattctcctgtctcagcccctaccagaagatgggattacaggcacgtgccaccacgcccggcaagtttttgtatttttagtagagatgggtttcgccatgttggccaggctggtcttgaactcctgacctcaggtgatccacccgcctcggcctcccaaagtactaggattacaggtgtgagccactgcacccggcccttgtttaaacaattttttaaaacacaagtttttagttaaattttgtgctgcacaatcgtaagttgctagtattataaacagttaataaaccttttcagaaaatagagtattcccgcaatctccgcactttgggaggctgaggtgggaagatttcctgagcccaagagttcaagaccggcctgggcaatatggcaagaccccatctcttcacacatttaaaaaattagccgaagagggctgggcacagtggctcacgcctgtaattcaagcactttgggaggccgaggcacgtggatcacaaggtcaagagttcaagaccaacctggccaacatggtgaaaccccatttctactaaaaatacaaaacaattagccacgcgttaagcaggtgcctgtaatcccagccactcgggaagatgaggcagagaactgcttgaacccaggaggcgaaagctgcagtgagccaagatccagccactgctctccagcatgggagaaagagcaagaccctgtctcaaaaaaataaaaataaaaaataaattagccaggcatggtgggcacacctgtagtcccagctacccaggacgcagaggtgggaggattgcttgagcccaggaggtgagggctgcagtgaggtgtgtctgctactgcacaccagcttgggcaagagtgagaccacatctcaaaacattaagagtacacatgtaaaaagatttatgctcgaccgggcgcggtggctcacgcctgtaatcccagcactttgggaggccaaggcgggcagatcacaacgtcaggagatcaagaccatcctggctaacacggtgaaaccctgtctctactaaaaatacaaaaaaaattagccaggcatggtggcaggcacctgtactcccagctactcaggaggctgaggcaggataatggagtgtattttgtattttgagggtttcaccaggctggtcttgaactcctgacattatgatccatccgcttcagcctcccaaagtgctgggattaaaggagtgagccactgcgcccagcccagagtttttctcttgttgctcaggctggagtgcaatggcgctatctcggctcactgcaacctccgcctcccgggttcaagagattctcctgcctccgcctcctgggagtagctgggattagaggcatgcgccacgaagcctggctaatttttttttgtatttttagtagagacgggtttctccatgttggtcaggctggtcctgaactcccaaccacagatgatctgcctgccttggcctcccaaagaaattttttttaaaatcagtttcaggtttgttttttctttttagaggagtctccctatgttgccctggctgccttgcagtggctattcacaggcatgaccataacactccttggctgaagctcaccctctactgcactccaccctgggtgacagggaaagactctgtctcaaaaaaaaaaaaaaaaaaagtaaagataaaatgaatacagaaatgttggcagcattctgaaaccagaaaagttaaaggttaagaaaaaatctgcagcaataagataaaggcattaagaccatgttaatgatgtgcagttattcattgttgagaagatgaaaatctaccagcaactggtctagaggaaaacaccaaggtcccctgtgatcagtcccccaggcctcccaactacatgcctcaaaagtcatctactgaaaaggtacacaacgaaaaagtacaccatactgcaatttactaagttcccagagcttcttatccagccatttataaagctctagtcccaaatatcagtggtccccaacctttgtggcaccagggaccagtttcgtggaagacaatttttccacagaccagtatgggtgcatggcctgggcactggggacccctgcatgtatcaaagagttaaaaacaaagtaggtttttcagagggtgggggaggagggaaggaaggaagacggaggatgcaggtggcctgctcctgaatttaatggctcctatcccaatactagttccattacctgttacctgcaaaatatactcagcctacattccattctgtcttcttcatacattaaagacaacactattcagagagaagctgagccaaaagactgctataatcccagcactttaggaggccaaggcaggaggacttcttgagcccagctgaaagaccagcctgggcaacacagagacccccagtctccacaaaaaagggggaaaaaaagaaaagaaagcctcaagcagtctggactgacgtttacacacaagaaactccttccgaagtggaaggagtaccagctttgcagggcaccagccttggcagaataccagtgacatttcaaatgtgttgtcacttttcctcaagtactggatccttatctgtaaaatgggtagtactttgcatggctgtttggataacaagtgaaagaaatagccaataaacagtagatgatattattattacagggtttcatcacaatgaaacactttaaagaggtttttcaatttgttagtaccattttacaccagtagtcagtgaagaaacactgagctttctacagtctttaacatgggacacccagcaactgatacagtaccctgcatataccagacaccattggtgctaattaatttaaactaactcttaattacacataggaacagagtaactccgaaagcaatcatacattcactagaatataaagtccttgaaaagatcttttgtctattttgttcactgatgaatcccaagtgtctaaagtgtctagaacagtgcctggtacatagtcggcattcagtaagtatttgtcaaatgagtttgggaacttgttttttagtactttaatactttgattaaggcttttcaaaagacaataatcttgacactcaaggacaacttttactcttcatataccagcctatacagaggtacctctcctcactctaaaagtaactacatgagccaggcacggtggctcacgcctataatcccagctctctgggaggccaaggcaggcggatcacctgaggccagaagtttgagaccagcctggccaacacggtgaaacacccgtctctactgaagaaaaaacaaaaattagccaggcatggtggcaggtgcctgtaatcccagctactcaggaggctgaggcaggagaatcacttgaaccaaggaggtggaggctgcagtgagccaagatcgcgccattgcactccagtctgggcaacagagtgagactccgtctcaaaaggaaaaaaaaaaaaaagaggaaaacatgaattgtgtaaccttctatgaaactttaagactcctttccaaatcagcttttgctaggttaaaaagaaacaaaaacaagacaatcttttaccaagattctacaattttgactgcaaaagctacttttccctttggtctcaatatttagggcagggttgtgctcactttggcagcacatgtactaaagttggaatgacacaaagattaaaaaacaaaaataaaaatattgggggtgggggagtaatcccctgctccatcagaatgggagatttctcctctcaatttacgaggatactccctcataaacacgttcggctgcagtagaaccaaacaggtgaagctccagtgaaacctgaggtggaaaataagaggctggggagatcaatgacctaaaacactaagtacaggaaaaacaggtagatcaaagtctgaatctttttacagtttttatggaattagaaaagacactgaaacaaaaaatactttaaaattctgttttggaatactaaggaagaaaatgaccacaaataacccttgggtccaattcggtttagtagaaggattaactttacattcagatttttaagaagtttgacatgttttctcaagtggttgagagtgttaagcatttctttgcgggggtgggggcagtaggcggggatggagtcttactgtttcccaggctggagtgcagtgccacaatctcggcattctgcagctttctacctcccgagttcaagcgattctgctgcctcagcctcccgaatagctgagattacaagcgcacgccaccacgcccgtctaattttttgtatatttagtagagacggggggtctcaccatgttcaccagcctgatcctgaactcctgacctcaggtgatccacccttcttggcctcccaaagtgctgggattacaggagtgagccactgcacctggctttttttttttttttttttttgacggagtctcactctgtcgttcaggctggagcccaggggcactatctcggctcactgcaacctttgcctcccgggttcaagtgattctcctgccttaacctcctgagtagctgggattacaggcacgtgccaccaccacgcctgggtaatttttgtttttttttttggttggttttttttttttttttttttttttagtagagacgaggtttcaccctgttggtcaggcttgtctcgaactcctgacctcgtgatctgccctcctcggcctcccaaagtgctaggattggccaggcgctgtggctcacgcctgtaatcccagcactttgggaggctgagttgggcggatcgtgagatcaggagatcaagaccatcctggctaacacggtgaaaccccgtctctactaaaaatacaaaaaatgagccgggcgtggtggcaggcgcctgtagtaccagctactccggaggctgaggcaggagaatggagtgaacccaggaggtggagcttgcagtgagccaagatgcaagtggagcgccactgcactccagcctgggcaacagagcaagactctgtctcaaaaaaaaaaaaagtgctaggattacaggcatgagcaaaccatgcccagcctttttttttttttttttaatagaaacggagtcttgcaatgttgcccaggctggtctcaaactcctggcctcaaatgacctcccaccttggcctccaaaagcaatgagattacaggtatgtcaattctttgatgagctaagaaacccccatcaaaatttcaacactttaatattttaatgtttcctaagtagtatattctgcattaagtatttcatactcatgaatgtgtttctaaaaatctacaaaaactgtcataactgtcatacaacagtgacaatattttctggtcaaataacgttcttgaaaatttcacggtaatcctatcataaatcttaactattttacaagtaaacctattacaatcaaatacaagtcattaatcccactaaatctttctcctttcctttttgagacagggtctcactatgtcacccaggtgggagtgcagtggtcttatcatggctcactgcagcctcgacctcccgggctcaagaaatcttaccaccttggcctcccaagtagctgagactacagacacatgccactaggtcaagctaattctgtttctttttgtagaaacagggtctcactatgttgcccaggctggtctcaaacttttgggcttaagggatcttcccgcctctgccttccaaagtattggaattacagggattattagccactgcacgtggcccctactaacatttaaacacttaaatttcaacataaaggtgttcacaacaaccactccaaggtcctacaaagtcttcagctgactaacccagggattaagtagtatttagtagctttttattaatcaaaacccattcactgtccaaggcttatattatgcctttagaatcacatttcacaaaattggtcatagctaacaccatttttcttaagtaatctgagatggctaaaatgcgaacatttaacaatgatttacgttttctttctttttttttttttttgagatggagtctcgctctgttgcccaggctggagtgcagtggcgcgatcctggctcactgcaagctccgcctcccgggttcatgccattctcctgcctcagcctcctgagcagctgggactacaggcgcccgctaccacgcccagctaattttttgtatttttagtagagacagggtttcactgtgttagccaggatggtctcaatctgctgacctcgtagtccgcccgcctcggcctcccaaagtcctgggattacagccgtgagccaccgtacctggccaattatttacattttctttctttctttttttgagacagagttttgctcttgtcgcccaggctggagtgcaatggtacaatctcggctcactgcaacctccgcctcccaggttcaagcaaacctcctgcctcagcctcccgaggagctgggattacaagcgcctgccaccacttcaagctaattttgtattttttagtatagatgggatttctccatgttggtcaggctggtcttgaactcccgacctcaggtgatccgcccaacttggcctcccaaagtgctgggattacaggtgtgagccactgcacccagcctacattttcatattacagcagctttcatcccaaattcagacaaaaggtgttacgtttgctaaggagaaagtctcttattaatctaaaattaatatcaaaacaactatataccagctcaacatgacaaaattattatttgggaataatctggacgacctttactttggatatgcaaatttacagatgtaagattaaggattttgagaatatttctttgtgcatatcttacataaggactaagcccagaagactacacttgctaagaataactcaaaaaggtaggttatcatctaatatgatcctagcacagcagtaacaaaaacaattatctgacctttcacattagataagaatgtttcacaacaaatagtaccgacaagtattacactttacagtttacaaaagcccaaaatttcataaccaccctgcaaattagtaggcaagagagacatcactaatccccatttgaaagataaggaacccagtgattcctgtgcattctgtgatggcagatttaccacatctgccaaatgatgaaatactgtcataactcttacagtaatgcatctccttcaaactttagatatgaatgaagagttaaacacatttcatattgctttagctcgataaaatcctgatctgatcacaaatcaagcccaccaacaacagatccgtccagctactatggtagattgttggaagggcaataaattcaagataaaaatttcagaagagataagccaggatcatggtcatatggtctgaactacacagtttggcattctaaacataacagttgtaacaagatatgggtgagcctttaaatttttatgtgggtatttggtatgaaagacacttgtaaaaataaaaaaataaaatgtatgtagggaaagctctgagcttaggacactgctaccaacacctaggtctattatatttttaaacacagaactggctcaaggtagccataagaaaaccaacacactaggtgttgacaccatcagaggatttggaatgccagcaagctctattttcagcaactaccacatccttaactagcacgttcccatttgtgggggagggagctaggaggaggaaattttcacttttcctttgacttatattctgccaaaggctaacttcatttgaaaaaaaaaaattcaacctcctagagacgtagatctaagctatctctgtgataaaaagctggacaacgtttaggaaactgttgtatgagtctaaatgacaaaatctagtaacaaatggccattaagtagggtgaccacaaggcaagtttgttgcccaggacaatcccagtttatgcctgctgttgtagctgatgaattagtctgtcttttcaagatatactcatgtggatgttaaattatggtgactttcattattatttgctacaatttaataaatttaaatgaacatctgaaattgttcttagggccatgactagcattaacatttagtcagagaaccatgaggttctgttggcaaccaattcgtcaatttggatatatcaatacctaaatatatcaagctggccgggcgcagtggttcatgcctataatccctgcactttggggaggccacagtgggaggatcgcttgaacccaggagttacctggacaacacagtgggatcccgtctccacaaaaaaaaagttttaattagctggtcatggcggtaccagctacctggtgggaagatcacatgagctcaggagttcaacatcagcctgggcaatccgctgggaccaggcctctaccaaaaaaatttttttgccagccatggtggctcacgcctgtaatcgcaaaactttgggaggccgaggcaggtgaatcttgagctcgagttcaagacctgggcaacatggtaaaatcctgtctctacaaaaattagccagaagtggtggtatacttctgtagccccagctacttggcatgctgaggtgcccagggggtcaaagctgcagtgagccataaatgtgacactgcatcccagcctgagtaatatactgagatcttgtctcgggaaaaaagaaaaagaaaaagaaaaaaaagttcttttaaattatccaggtattgtggtgcacagctgtgggcccagctaagtgggaggctgagatgggatgatcatttgggcctgggaggttgaggatgcagtgaatcgttactgcatcaatgcaatccaagcctggccaacaaagcaagaccttgtctcaaaaaagtatatgtatctatctcaaactgttaactgaccatttcaaaaatagtgaaaatagccatttttcttgctgctctttcctactccttaatggattccattagacagctatctagccaaccacccggaacaacactggtgaatcatatgccaacctttgtccctcctagaagttgtatgtctatatctggccgggtgcggtggctcacacctataatcccagcattttgggaggctgaggcaggcggactacctgaggtcaggagttgaagaccagcctggctaatatggtgaaactctgtctctactaaaaatacaaaaattagccaagcatgatggcccaagtctgtagtctcagctactcgggaggctgaggcaggagaatcacttgagcccaggaggcggaggctgcagtgagccaagatcacgccactgcactccagcctgaatgacaagagggaaaatccatctcaaaaaaaaaaaaaagttgtatgactacatcactaacctaacaacttaatagcattcactaagacaaaggtggccgggggtggtggctcacgcctataatcccagcactttgggaggccaagtctgacagattgcttgagtccaggaattccaagaccagcctgggcaacatggtgaaaccccatctctactaaaacacaaaagaaattagctgggagtggtggatcgcgccactgtactccagcactccagcctgggtgacagagcaagactccatctctccaaaaaataaataaataaataaataaataaataaataaataaaatttaaaaacatacaaacaaacaaaaaaaacagctacttaagaggctgaggtggggggatcacctgagactggaaggtagaggctgcagtgagccaagatcgcaccactgcactacagcctgggtgaccaagtgagaccctgtctcaaaaaaaaaaaaaggaaaaagataaaagtgagaggagaaaatattttaaagctactttacagaaatgcatagcatcagccatatcccagtacagacattatgataaactacggggcttttcttttcttgagacaggctctccctctgtggcccagactggagtgcaatggtgcgatgtgggctcactgcaatctccacctcccagggtcaagcgatttcccacctcagcctcctcagtagctgggactaaaggcacaagccatcacaggccagctaatttttgtatttttagtagagactggttttcaccatgttggtcaggatggtctcaaactcctgacctcaggtgatccgcccacctcggcctcccacagtgctgggattgcaggtgtttgagccgcggaacccggctggggcttttctttttttggttgtttttttcttttgcttaaagaggtgacatctgcctacaataaatcatgttttttaagaatctgtatgcgaataaacattctgagagtacctaaacttcacctcattttaatttcgctgtgccttgagatgggattttatctctgaaaaaaaccatcaggtttctttaggaaagtgaaaagattttgtctacaattcaccatggatatcagtcatcacaaacatcaagatgtgaagtagatgctattagaattgttaaagaacaagcatcaagcatacgctactcaccccctactcccctgaaaggcaccaccttacttcacagaggtcttttgagtggctgagagtaagtgtaccgatctaaaggtcagcagacactaagttctggctttaccatttaataactgattagccacatgatcataaaaaaatctctctctcaaactcactttcttgaaccagaaaatgggagtaacgctctacctgcttcaatcttgttacataaattaaaaacttttgtcaacgtgggctgtgaactgaggtactgcataatgtcatatacacatatgtaaagtttaggccagaagcagtgactcacacctgtaatcccagcactttgggaggccaaggtgggagtccaggaattcaagaccagcctgggcaacatagagacctcaaatccacaaaaaaaaaaaaaaaaaaaaaaaaacacaaaaattaggccggtgcaacagtcccagctactagggaagctgaggcaggagggtcactggaactcaggaggtcgagcctgcagtaagctataatggcgacactgcacttcagcctgggtcacaaagcaagaccctgtttcaaaaaaaaatttttttttaatttagccttcccataaatacatacacctaatatgtgcccattaaaaaattaaaaatttaggccaggtacagtggctcatacctgtaatgctagccctttgggaggctgaggcgggaggatcacctgaggtcaggagtcagagatcagcctggcaaacatggtgaaaccccatctctactaaaaatacaaaaattagccaggtgcgatggcgggcgcctgtagtcccagctactcgggaagcagaggcaggagaatcgcttgaacccagggggcagaggctgcagtgagccgagatcctaccactacactccaccctaggtgacagagcaagactgtctcaaaaaaataaataaaaataaaactgcagcctttactccatgcttgtcattactgtttgtgtacacagtgttcttgaaatataaagaaaaaatatgcctgcagtatcagtcacccttacagtcatccatgaaaaaaaaaaacaatcaggccgggtgtggtggctcacgcctgtaattccaacactttgggaggccgaggcaggcagatcacctgaggtcaggagttcaagaccagcctggcaaacatggtaaaaccctgtctctaccaaaaacacaaaaattggctgggtgcggtggctcacacctgtaatcccagcagtttgggaggctgaggtgggcagatcacctgagatcaggagataaagaccatcctggccaacatggtgaaacctcgtctctactaaaaatacaaaaaattagccgagtgtggtggcacgcgcctgtagtcccagctacttgggaggctgagccaggagaaccgcttgaacctgggaggcggaggttgcagtgagccaagaccacgccattgcactccagcctgggggacagagcccagtcgtagaagggatttttaacactacgttactcagttctgtctatgcatttaagaaggagaaaaataaactttactccagaaagttagtccattaactgaaacggcaatggaaaattactggcctacagtcaaagaactggtagttaatctaaatacttctaaacttattaacaacgttaatttactactacctatttttttcctaacaagaccgtagtaaaaagttcattccacacatgctcccttccctgttcttcactaactagcagaataagctagctagagatgaggatctggtgttttaaaaggacagctctcagcgggctcagtggctcacgcctgtaaccccagcactctgggaggccgaggcgggcggatcacctgaggtcaggagttcgagatcagcctggccaacatggcgaaaccccatctctactaaaaatacaaaattagcctggcatagtggcggatgcctgtaatcccagctactcttggaggctgaggcaggagaatcgcttgaacccaggggatggaggttgcagtgagccgagatcgcgctattgcactacagcctgggcgacaagagcaagactccgtctcaaaaaaaagacagctcttgaccaggcgcggtggctcaggtccttaatgtcagcactttgggagactgaggtgggcggatcacctgaggtcgggagttcgagaccagcctgaccaacatggagaaaccgtgtctctactaaaaaagaaatacaaaattagcatggcatggtggcacatgcctgtagtcccagctactcgggagggtgaggcaggagaatcgcttgaaccctggaggcggaggttgcagtgggccgagattgtgccacttcaataaagcctgggagacagagcgagactccgtctcaaaagaaaaaaaagacagctctcaagtaaatgactcaacagatgcattcctagggaatccaacatgaccatcaaaacttcatcctaccttccatgaagccaatcttgatagggaagagactaggaaaggacaaaaccaacaacagccccacaagcccaaatgtagtttatgttacccctctgctccccaaaaacgggtaaacttttcccctctatattccccgttttttattgttgctgttgcccaggatggagtgcaatggcgcaatctcggctcaccgcaacctcggcctcccgggttcaagtgattctcctgcctccgcctcccaagtagctgggattacaggcacccaccacccccggctaattttgtatttttactacagacggggtttctccatgttggtcaggctggtctcgaacttctgacttcaggtgatccacccgccttggcctcccaaagtactgggattacaggcatgagccaccgcacctggcctcttttttttttttttggagacaagagtctcgctctgttgcccaggctgtagtgtaatgccataatcctggttcactacaaccttcacctcccgggttcaagtgattcttccacctcaacctcctcagtagctatgcccggataatttttttatttttgtagagacagggtttcaccatgttggccaggctggtcttgaactcccgacctcaggtgatccacccgcctcgacctcccaaggtgctgggattacaggcgtgagccaccccgcccggcctttcttccccactttcttgtactatttcatatacgggacagtaagagctgtttgagaaatgctaagaaataatggacttgcttaatatggtttcaaaggaggtaaaaacgattcgaatagactactggcttgttaaagtgatgagatgctagatttaatcttcaactcccagccccaaacttaaatatttcctgtgacccaaaattgtcattttcctgaacacaggttagctcttcctcccgtactgttaaataatccatataaattgattccaacgccccaggatagaattaaatgaggatacaaagaagtttaggcactaattcaacacagcaagcaaaataaaataagcctgctgcagtaacagagagataaaagggcagctggaaacccagcatttgggtacaagtacccaacaaagaaatcctgccaatacactgtcttaccttcttccacccccgacacctgctaagttctgtttggtgaccagaactccgggaaaactttgccaccagaaacaaaaaaataccgcactcaataaaggaatggacacaggtagaggacacaggtagaaattcctggtttctgtctcctcctcctcctctcctttccactgagtccctaccttatgccccaagtcacagcaatagctcctcaccttgtagatcctatttccttacccctttagatcctgaaggggacacctaacattaacaactgtaataatgtggctgtatcagagtcccatgttcaataaccaataagggctctggtcagaaatcctcaccactcacatcaaaaatataattatcactaacctgtactttatttggaaactacaatcacaagctttcaaatcagttttttaaaggagctttcaaaaagaaaaagacctttcctcacatcctttctagttatcacagcaagtttacttaaaaagccccaatacccacaaaatagaaagcattcaagtacaatttgtttcctcccaagaacactaacagattaagaggggaacatctggagatgagggggcggaggaggagacttccaatacaagcacattcatatctctttgatttttaaacactgaaataaagacaaagcagaccttgagctgtacttccccatcttatccccccccccaacaggaaccttgttgaatacaaatagcaatttaagaatttacaagacgaaatttagttcactatatttcctaaatatgagttctagaggccttgtcttattttcaaatccctgaatcttatttctgatgataagggggactaaccctgaggttattcacatgactaaatccgcatttcgaggaaagcaagggccctaacattttgaaatataggtattttaattaggaaaaaaatctaagaatcaaagatacttgattccaaccatgtctcaccccaccctaccacgcaaaagcattaaaaccacaggacccacagacatgacctttcgtttaatactacagtatcgcacaattataaatgtgtgggtatttcaaaaggtggtccaaaaggtggactgggagagaggattaagaataaacttcctgacaatgactggacagacacaatggacattcgatgaagttctgaaaaaggactggagaacccattaggggcaaaagaacaacgaacaaagaggacctactaatatttctacataaacccatttatttaaaacggaaaaaaagaaagcaacaggatcttcaaccttcataactcaaaaaacccagcctcagccgagcgcctggaataggttaagatcccccacgaagtacagaccagcattccgagcctgcagagtcaaccaaaatacagttactgaacactattggaaataactttatttcaacaggtcttcccatttgtcatcacggtgcgcacaaactgtaaagtcatcgtttttacaaacggggggacggaggctcgggctctacaaaggctcgaactctcagagtcgtggcctcctggttctatccatcagaacccacgggtgatggagccagagaaaggttacaggaacttcgagatctcctgttttaagtctgaggaaagggagggagtgaggattttctgggcctccccagaagacgacgaggaggaaaagccccgaaacccctcactacgaggtgccggcctacgggaaagaaacccgatcgcagcatgggagcctgccaccgcccgaagacgaactgcagtgattcccactcacccctctccccccaccatcatccacgactgtcccccacctcaggcctgaggaagcccatcgctctcaaaggtcctcctttgtgagactccacggccgccgccccacacggggcctccggggaaaagccaccgcccccacccgccatatttccctgaaaggcgcccgcgctacagctcccggtcttcgctctctcccatgtggcgggtgctgcttcccccgtcaccccacccaattgttctccacatcccaaggccgtcccagaagctcccatgagggtggctcgttcggagacagcacccgccatctcctccccctcccccgccccgggactcgccctccccccagccgccattttacaaccaactcctccaccccgtcgccccggcctcccggcccgcgagttgtttgcagttaaggacggcgaaggggtcacattccagggcatagagcctcccatcgccccgggagctcccaggccatttcctgcttcccgaacccaagcccccgggccaggctcgcagacgatgccgccattttgtctcctgttcccggcctctgtgggcggcggcagagggtccgagaattccagccccccgttgcccccccaactcaccgtcgtatcgctcagcctgctcggccagcttcgcctggtacaccagatcctctcgatcatccatagcggcagcggctccggcagggtctgcgcgacggatggaagcggatagtgtctccgactctctcagcctctcgctccgcgtccgggcagcaaaaatggcggcgcctcaatccgggacttccgcctgcgcacgcggacaactgctcagctctatggcaaccgctccctggcaactggcgcggggggcgggtcctggaactcggcgcccgaagcggctggaacgagcgcacgagacgcctctcctctgtcggctcagcgggcgccggagcccagaggcgggaactgcgactgccgaaagggagcggcccccggggaacgagaagggctgaggcggggccggccgggactgctcctgaaaaaagccagcgagagacctgggtcagaccggggcccgaggcccgacctgcggaaaagaacgacggaggctgtaacggtttctgtcatggcaggtcttctttcccgaaatctgaggctgtcactaccgcgccctggttttcttttcttttttcttttttcttttttctttttgagacggagtttccctcttgttccccaggctggagtgcagtggtgcgatctcgggttaccacaacgtccgccttcccgggttcaagtgattctgctgcctcagcctctcgagtagctgggatttcaggcccccgccaccacccccagcttttgtatttttaatagagatggggtttcaccatgttggccaggctggtctcgaactcccgacctcagatgatccgccccccctcggcctcccaaagcgctgggattccaggggtgagccaccgcgcccagcccacgtcctagttttctcggccaagcctggtcatgggcctttttcagacacttttagactcagggtaacgaaccgggccctggccgggcgcggcggctcatgcctgtcatcccagcactttgggaggccaaggcgggaggatcacaaggtcaggagttcgagaccagcctggccaatatagtgaaaccccgtctctactaaaaatacaaaaaattagcttggcatggtggtgcatgcctgtcatcccagctactcaggaggctgaggcaggagaatctcttgaacccgggaggcggaggttacagtgagccgagatcctcccattgcactccagcccaggcgacagtgtgagactgtgtttcaaaagaaaaattatatatatatacaaaaattagctgggcgtggtggtgcatgcctgtaatcccagctactccagaggctgaggcaggagaatcgcttgaacccgggagtgggagggtgcagtgaaccgagagcacaccattgcactccagcctgggcaacaagagcacaactctgtctcaaaacaaagaaaaagaaaaaaaacgaactgggccctgttacagttgtcagggacaggggagctccagttttcacgcctcaactttcccctcacactgatctttgtcttctcctgtttaacctttttccctccctaggcccactatgaataggagcagggaatttgttagatgagggtggtgtggagtacatggtacagaagagttggaccaagatcaaataaagattgtggaggcaggaataactcagtgaacattgcttcagcttctggcgcttgggaggcccatgcggaaggatgacttgagcccagcctgggcaacatagcgagactccatgtctataaaaacgtttttttttttttttatttgagtcggcatctcgctctgttgcccaggctggagtgcagtgtcgtgatctcggctcactgcaacctccacctcccgggttgaagcaattctcctgcttcagcctcccaagtagctgagactacgggcacatgccaccacacccggccaattttttgtatttttaatagagacggggtttcaccatgttagccagggtggcctcgatctcctgacctcgtgatctgcccacctcggcctcccaaagtgctgggatgacaggcctgagccatatcttagcagtttcagaggctgaagcaggaggatctcctgagtccaggaggttgaggctgcagtgaactgtgattgcaccagtggactccagcctgggtaacagagcgagaccctgtctcaaaaaataaagtggggagagggagggatcttgccacgttgcacagactggccttaaactgagttcaagcaatcccaccttggcctcccaagtagttgggaaactacaggcttgcaccaacgcacccaatcttgcatcctattttgtggccaagggagctgtatgattttgcgtggaggatgatgtcatcatagttatatttcagaaatattaacaaatattccatagcaatgattaaagaggaggataaccaaacgtaatacgtgggagcaatgaaaatagaaaggaaaggataaataggaatagcactatagagggaagccacaagcagctgatcagattgcagctcttttttttttttttaccattacatatataacattttattataatttaaggtatagtcgataatataatgttttttttgtgttttttttgtttttttttttaaattgatcattcttgggtgtttctcgcagagggggatttggcagggtcataggacaatagtggagggaaggtcagcagataaacatgtgaacaagggtctctggttttcctaggcagaggaccctgaggccttccgcagtgtttgtgtccctgggtacttgagattagggagtggtgatgactcttaacgagcatgctgccttcaagcatctgtttaacaaagcacatcttgcaccgcccttaatccatttaaccctgagtggacacagcacatgtttcagagagcacagggttgggggtaaggtcacagatcaacaggatcccaaggcagaagaagttttcttagtacagaacaaaatgagaagtctcccatgtctacctctttctacacagacacggcaagcatccaacctctcaatcttttccccacctttcccccctttctattccacaaaaccgccattgtcatcatggcccgttctcaatgagctgctgggcacacctcccagacggggtggcggccgggcagaggggctcctcacttcccagtaggggcggccgggcagatgcgcccctcacctcccggacggggcggctggccgggcggggggctgacccccccacctccctcccggacggggtggctgccgggcggagacgctcctcacttcccagatggggtggctgccgggcggaggggctcctcacttctctgacggggcggctgccgggtggaggggctcctcacttctcagacggggcggccgggcagagacgctcctcacctcccagacgatgggcggccgggcagagacgctcctcacttcctagatgggatggcggccgggcagagacgctcctcattttccagactgggcagccaggcagaggggctcctcacatcccagacgatgggcggccaggcagagacgctcctcacttcccagacagggtggcagccgggcagaggctgcaatctcggcactttgaggggccaaggcaggcggctgggaggtggaggttgtagcgagccgagatcacgccactgcactccagcctgggcaccactgagcactgagtgaaccagactccgtctgcaatcccggcacctcgggaggccgaggctggcagatcactcgcggttaggagctggagaccagcccggccaacacagcgaaaccccgtctccaccaaaaaaatacgaaaaccagtcaggcatggcagcgcgcgcctgcaatcgcaggcactcggcaggctgaggcaggagaatcaggcagggaggttgcagtgagccgagatggcagcagtacagtccagcttcggctcggcatcagagggagaccgtggaaagagagggagagggagactgtggggagagggagagggagagggagagggctttttttttttttttaattttgagacagtctcgctctgtcgcccaggctggagtgcaatgtcacaatctcggctcaccacaacttctgtctcccaggttcgagcgattctcctgtctcagccccccaagtagctgggattacaggtgtgccccaccatgcccagctaatttttgtatttttagtagagacagggtttcaccgtattagccaggctggtcttgaactccgacctcaggtgatcctcccacctcagcctcccaaagtgctgggattaccagcgtgagccaccgcacctggcccagattgaagatcttataataaaaattgactttccatctttccaccctgagaatattaacaaaaaatgggaatgctaggaacacttgctgatggaatgcagagaaagacaaagttcttttagcacatgttggttcagaggatcagggatccgcaggtacccaaggatcacccaggtaaaaatgaccacgaaggagttgtaaaaggggacacgcattccaaatagaagggaagctgttggccgggcacagtggctcacgcctgtaatcccagcactttgggaggccaaggcgggcagataatgaggtcaggagtttgagaccagcctgaccaaaatggtgaaaccctgtgtctaccaaaaatacaaaaagtagctgggcatggtggcacgcggctgtaatcccagctactgaggaggctgaggccggagaatcacttgaacctgggaggcggaagttgtggtgagctgagattgcgccactgcacctcagcctgggtgacagagtgagactccatatcaaaaaaaaaaaaaagaataaaaggaggtgtcagtcgtattaaattctgcagagacataagtcagattagcactgagggaaagccattggatatagcgattaggtcattagtgaccttcaaaaggagtttcgaaatggtgttggaagccagattgcatttggttgaagctcagggaagtcgagaaagtggaactggtaagcataggggtctcctgagaggagcagtgaagacagacaggtaatttgagagcaatgagtggccaataggggtggccaaattaaggatttggtccacacattcacaaacctacctacaaagacagctctgctgccgggttgattacaggggctgccgtggctatgcagctgtctgtgctggggaaagaagctatcggccgtctctttcacaaagaagcttctgtacagtgtctccccagacccgccgaagtctctccaaaagtgcctcttcctacgtaactgctgagacggcagaaaccctacacgtagattgctggtgtgactgcactgcccgttctctcaatacatggaactaacgggcagacatggttgatagggcaccaaaaatagacagaaacaattttgatgtagcattcgggattataaacagatataaaacatcctggtgctgcgcagaagtggctgtcgtgatacggtcctgcgcttttcacggctgctgcggccatagatacttcacttgctattgaaacgcctttgacacaatctccaggtcataggtcacaaccccaagtgtaagtctccctgcctgatagaaaatctgctttaataagaaacaagaactcactcagtccgtccggagagcccctagatatgtggcagtgtactaagcactatgagaaggaaataagatgttaaaaaatatcattaaccaggctcggtggctcacttctgtaatcccagcactttgggaatctgaggcgggtggatcacctgatgtcaggagtttgagaccagcctggccaacatggtgaaaccccttctctactaaaaatacaaaggccgggcacggtggctcatgcctcttatcccagcacttcgggaggccaaggcgggcggatcatgaggtcaggagttcgtgaccagtctggccaacatagtgaaaccccatctctactaaaaatacacaaaaaattagccgggcatgggggtgtaatccccatgtaatcccagcttctcaggaggctgaggcaggagaatcacttgaacccggaagccagaggttactgtgagctgagatcatgccactgcactccagcctgggtgacagaacgagactccatctcaaaaaaaaaaaataaaaataaaagtaaaaatacaaagattcgctggacatgatggcgcacacctataatcccagctactcgggaggctgaggcaggagaattgcttgaacctggagggaggaggttgcagtgagcctactcgggaggctgaggcaggagaatcgcttgaacccggggggaggaggttgcagtgagccaagatcatgccactgcactccagcctgggtggcagagcaaaactctgtctcaaaaaaaaaaaaaaaaaatcaatagactttatggtatttaaaaaaaaaaacaaaaaaaacccaggctcagcatagtggctcatgcctgaaatcccagcactctaggaggccaaagtgggaggatcgcttgagaccaggatttcaagaccagcctgggcaacactgtgagacccccgtctctacaaaaaattgttggatgcactgcacatccaggtgttggcatgcacctgtagttccagctactccggaggctatagtgggaagatcgcttgagcccaggaggtggaggctgcagtgagccatgatcacagcactgcactccagcatggccaacagggccagactctgtcttgaaaaaaagaaaaaagaaaaagaacaaagaagaaataaaaaaatctatgcatgcttggtggctcatgcctgtaatgccaacactttaggaggcttaggtggggggaatcgcttaagcccaggagtttgagaccagtgtaggcaacatactgaaaccttctctttactaaaaatacaaaaattaacggcacggttgtgtgtgcttgtagtcccagctacttaagaggctgaggagagagaattgcttgagcccaagacttggagtttgcagtgagacttgatgacaccactttactccagcctgggtgacagacactatgtctcaaaaaaacaaaacaaggcctggcgcggtgactcacgcctgtaatcccagcactttgggaggccgaggcgggcagatcatgatgtcaggagttcaaggccagcatgaccaacatagtgaaacctcttctctactaaaaatgcaaaaattagccaggtgtggtggcacgtacctgtaatcccagctactcggaagactgaggcaggagaatcgcttgaactagggagtcggagggggcagtgagccgagattgagccactgcactctagcctggcgaccgatcaagacctcgtctcaaaaaaaaaaaatccatatctaaagtgatttgaaatgacatgtttattatgtttcaaattttcctatgtctggttctagaatttttctattcatttcctctgatctgtttgttcttatgtcgataagattttaaatataataccattatagtatgtttttatatctggtagaacatttttttattcaaaatttcactgattttatacttttactctgctagatgaacttcagaatcaacttgaaaagttctctcggccgggcgcggtggctcatgcctgtaatcccagcactttgggaggccgaggtgggcacatcatgaggtcaggagatcgagaccatcctggctaacacggtgaaaccccatctctactaaaaatacaaaaaattagccgggcgtggtggcgggcgcctgtagtcccagctacttgggagactgaggcaggagaatggcgtgaacccgggaggcgcagcttgcagtgagccgagatcgcaccactgcactccagcctgggcgacagagcgagactccatctcaaaaaaaaaaaagaaaagttctctcaagacccatgtaggttttttggggggctgttctgaatttatagattaattaaaagacaattggaaattttttttcttttctttttcttttcttttttctttttttttttgagacaaagtttcgctcttgtggcccaggctcgagtgcaatggcacaatctcggctcactgcaacttctgcctcccaggttcaagtgattctcctgccccagcctcccaagtagctggaattacaggcatgtgccaccacgcctggctaattttttgtatttagtagagatgggatttcaccatgttggccaggctagtctcaaaatcctgacctcaggtgatccacccgcctcgccctcccaaagtgctgggatgacagacttgagccactgcacccagcccaagaattggagatatgttcaaaaatgagttttctcaggaaaattctccaattttattccagtctccttgctgaaatgatttttttgtttttttttttgagacaaagtctcactctgtcgcctaggctggagtgcagtggcacaatctcggctcactgcaacctctgctccgggttcaaacgattctcctgcttcagcttcctgagtagctgggactacaggcgcacgccaccacgcctggctaaatttttatttttagtagagatggggtttcaccatgttggccaggctagtcttgaactcctgacctcaggtgatctgcccgcctcggcctcccaaagtgctgggatgacaggcgtgagccactgcgcccagcctgaaatgatcttaagtacaattgtatagttagatgtataaaggtctcacatatttctaattaactttgttcccaagtatttaggaggctattgataattataaatgggctctcccccattttatatttctttttttctttttttttttttgagacagagtctcgctctgtcggccaggctggagtgtagtggcacgatctcggctcactgcaacctccgcctcccgggttcaagcaattctcctgcctcagcctcccgagtagctgggattacaggtatgtgccaccacgcccagctaatttttgtatttttagtagagacagggtttcatcatgttggccaggctggtcttgaactcctgacctcaggcaatccgcccacctcagcctcccaaagtgctgggattacaggcgtgagccactgcgtccggccctattttatatttctgattgatctatacttccactgatatatacaaaaatcactttttttttttttgtatagacggggtttcgccatgttgctctgtctggtctcaaatgcctgggctcaaccatctgccagcctcagcctcccaaagtgctgagattacaggcatgagccactgcgcccagccccaaatccatgatttttgatagttatcttgtacccaactgccttactgaactctgtcttattagttctttttttttttttttgagacagagtctcactgtgttgcccaggctggagtgcactggcacaatctcggctcactgcaacctctgcctcccaggttcacgccattctcctgcctcagcctccctagtagctgggactacaggcgcccaccaccatgcccggctaatttttttttttttttgaggcggagtcttgctctgtcgcccaggctggagtgcagtggcgcgatctcagctcactgtaagctccgcctcccgggttcagaccattctcccgcctcagcctcccgagttgggactacaggcgcccgccaccacgcccggctaatttgttgtatttttagtagagacggggtttcaccgtgttagccaggatggtctcgatctcctgacctcgtgatccgcccgcctcggcctcccacagtgctgggatgacaggcgtgagccaccgcgcccagccaagttcttatttaattctaacttctttctgcattgacttggagcttcagagaagtattaaataagagatataataatgggcattattgaattctattgaatacttgattttaataggaatgactctagtgtttcaccattgaggtttactattggtttctgataaataatatttttttctttttttgagatggagtctcactccgctgcccaggctggagtgcagtggcacgatctcggctcactgcaacttccacctcccaggttcacgccattctcctgcctcagcctcctgagtagctgggactacaggtgtccactaccatgcccggctaattttttgtatttttagtagagacagggtttcaccatgttggccaggctggtctctaactcccaatctcaggtaatctgcctgcctaagccttctaaagtgttgggattacaggcatgagccactgcgctcggccctaatttttgtatttttagtagagacagggtttcgccatgttcaccaggatggtctcgaactcctgacctcaggtgatctgcccacctcagcctctcagagtggtgggattacaggcgtgagccactgcgcctggccccttcctgcctttttctttctttcttttcttttctttttttttttaaagatggagtttcactcttattgcccaggctggagtacaatggcacaatctcggctcaccacaacctccacctcccgggttcaagcaattctcctgtctcagcctccctagtagctgggattacaggcatgtgccaccacgcctggctaattttgtgtttttagtagagacggcgtttctccatgttggtcaggctggtctcgaactcccaacctgaggtgatccgcccgcctcggcctcccaaagtgctgggattacaggcatgagccaccgcgcctggccattttatttttcatatcatgtatgaaaagacgacaactctgggctgtttgtcatgtaaagtatctcacactctggactttttttttttttttttgaaacagggggtctcgctctgtcacctaggctggagtgcagtggcgcaatttccgctcactgcaacctccacctcccgggttcaagccattcttctgaactcagcctcccgagtagctgggattaaggcgcctgccaccacgcccaggtaatttttgtatttttagtagagatacggtttcaccatgttagccaggatggtctcgatctcctgacctcgtgattacaggtgtgagccagcacacccggccctctggacttgtttctttgcttccttgtgatgctgtttaaattgtttcctattccttaaatttcctgtaaagtggtggttggatgacagccaggttcaggttttgttttttgtttttttttggttttttttgccagaatacctcagaggtggtgcttgctgcaagcttcctttggtcttattgtgctaagactgacaagtgacaatatttaaagaatatgtttgctggggccgggcacgggggctcatgcctgtaaccctggcacttgggacgctgaggtgggcagatcacctgaggtcaggaattggagaccagctgggtcaacatggtaaaaccccgtctctagacagagcaagactccgcctcaaaaagcaaaacaaaataaaaagaatatgttcattgagaaacaatttccacaccatgaattcacctattttgagcaagaattcaatgagttttagtctattacagagttatcccgccatcgccacagtcccattttagagcattcccatcaaactaaaatcaaactttgtgcccatttacaatcaacctccattcctactcccagccctaggcaaccactcatctatttcctatctctatagatttgtcttttatagaaataaatcatattttgtgtgctttgtttttccggtgacttctgaattcaatgtagacatattaacctcactgagtctttgttgtttttccttgctcgcgtttctctctattcctcattgatttattctgatccattaataagagttgtgtctttcgttttgtgctgacttcattttgctgcgttgcgtaccctgtgcccttgcatattctttagtaaccagctctgtgctaactttcatttgaatagcagggccctgttggctcataaggaacttttgtgggactcattaaaaaaggtactcctgctaaagaaatgcccttgtttgaattaaaaaatgatcctgctgggtgcagtggctcacacctgtaatcccagcactttgggaggctgaggcaggcagatcagctgagctcaggagttcaagacccgcctaagcaacatggcgaaaccccgtctctactaaaaatacaaaacatagccaggcgtggtggcaggtacctgtaatccccgctactcaggaggctgaggcaggaaaatcgcttgatcctaggaggcggaggatgcagtgagccaagattgcgtcactacactccagtctgggcgatagagcgagactccatctcacagaaaaagagggtccttcccagcagtaggggaggctgaggcaggaggactgcttgagctcaggagttctagaccgacctggccaacatggtgacacccccatctctataaaaaatacaaaacctagctgggcgcggtggcgcgcacctgtagttcctaccaatcacaaggttaagttgggaggatactttgagcccaggtggtcgaggctgcagtgagctgtgactctgccactgcactgcagcctgggtgacaaaatgagaccctgtctcaaacacacaaaactaaacaaaagtgatgatcctgcaagcagacaaagcctgctggagtttcggctggccttgtgccttgctttcatcaatagaatgcaggggagttcggcggctgcaccttctgggaagcaaggagcacctctgctcggcagctgtgcaactctccaggtgtgacgtggcagccttgtgtgtgacctttctgccctccccaagtttgcattttcttttttttttaatctttgagacagagtctcgctctttcacccaggctggagtgcagtggcgcaatcttggctcagtgcaacctctgcctcccggattcaagccattcttctgaactcagcctcccgagtagctgggattaaggcgcctgccaccacacccagctgctagattttttatatttttagtagagacggggtttcaccgtgttagccaggatggtctcgatctcctgacctcgtgatccacttgcctcggtctcccaaagtgctgggattacaggcgtgaggcactgcacccggccccaagtttgcattttcaacagtaaagtttacttttaaattaaaagatttaaattggggaaaataacaaaaagaatgtaggggactgacattgtgtcaattccacggctacaccttaagagaccttggtctcttggaaccctgccaatagccacggactcagtccaggcagccctgctggaggatgggagaccacaggaagtagagataaactgtgtcagctgagggccatccaagatcaaccagcccctgccaatcagcatctgacctcatccatgagtgaaactggccaagacttggagaactgcccagctgagcccaaccccagctgctgacctgtgtaattataagatggctaagtgattgttattttaagccactaaggattggcatggtttactttgcagcaaagctaactgatagagtaactttgtttgttttgagacagagtcttgctgtgatgctcaggctggagtgaaatggtgtgatctcgacttactgcaacctccgcttcctgggttcaagtgattctcctgcctcagcctctcaagtagctgggactacaggtgtgcgccacaacgcccggctaattttttttttttttttttttttttttttgagacagagtcttgctctttctcccaggctgagagcagtgtgatctcagctcactgcaacctccacctcccaggttcaagcaattctcctgtctcagcctcccaagtagctaggattacaggtgcctgccactaggcccagctagtttttgtatttttagtagagacagggtttcaccatgttggccaggctggtctggaactcctgacctcaagtgatccacccgtcttggcctcccaaagtgctggaattacaggcgtgagccaccgtggccggccttaatttttctattagacatggggtttcaccatgttggccaggctagtctctaactcccaacctcaggtgatctgcccaagtcggcctcccaaagtgctaggattacaggggtaagccaccgtgcccacatggcttttgatgacttctagcccacctattctgttttcactttttggttcagaatacaacctctgggtatctgctgtgtctagcagggctgggtgttgggaatacaacaatgagtagctgtggccttgtgatggatacactcacgggcaatctcagctcagtgtgaggtcacgccagtaagtgcatgttagcaagacaggacacaggacaggcacctaacccaaattaggacgttagataagactgatgtttgaaaatgagatagagttacagtgtccaaaaacccagaggagagagcaggtgggtcaggtaaagacagggcaagaaattcagtgtggctggagcccagagcaccagagggagagtgaggaagatgaggctgggaagggaaggaggagctcgaacatgaagagctccgtttccctttgcagagagtttagacactggctgaaggagaatataatctaataggagatgatataaaagctcacaggggctgcgatgtggatggactggaagggccaaaactagtgacaaggagcccagttaggcagctgttgaggtcatccagacgaggcgctggcagtttgaactacggtggcagcagtggggagggaggaaagtgaactgtgcaggactaaggacttggtaaatgaccagcgagaggaaagaggagaggattgcctccagagctgtggcctggccagcggtgatagacattgagataggaaagctgaacgaggagcaaatggggagcgggatcatcaatttgtttttatttttgagatggggtctcaccctgttgcccaggttggagtgcagtggtgcgatcgcggctcactgcaacctccacctcccgggttcaagcgattctcctgcctcagcctctcgagtatctgggactacgggcacctgccaccatgcctggctaatttttaaaaattattttagtttattttatttagacgagtgagtctcgctctgttggtcaggctggagtgcagtggcacaatctcggatcactgcaacctccgcctcccggattcaggcagttctctgcctcagcctcacgattggctgagattataggcacctgccaccacgcccagctaatttttttgtatttttagtagagacggggtttcagcatcttggccaggctggttttgaactcctgatctgatccacccgcctcagcctcccaaagtgctgggattacaggtgtgagccaccacacccggcctttttttttttttttttttttttggagacagagtctcgctctgttgtcccagctggagtgcagtggcgtgatcttggctcactgcaagctccacctcctgggttcatgccattctcctgcctcagcctccagagtagctgggactacaagcactcgccaccttgcacagctaattttttgtatttttagtagagatggggtttcaccatattagccaggatggtctcgatctcctgactcggatctcctgactcgtgagccacccgcctcggcctcccaaagtgctgggattacaggtgtgagccaccgtgtccagcctatttttattttttagagacagggtctcactgtgttgcccaggctggtctcgaactcctgaactcaagtgattctcctgcctccgcttgcaaagtgttaggattaccggcatgagccatcacgcccagcagggatcatgaatttggcttggaatatgttgagtgtgaggtgccttcaccacttccaaatggagacgtccatccagcgagaactgatagttttgtgtttttttaacagacggggtcttgagccaggcgcagtggctcacggctgtaatcctagcactttggaaggctgaggcaggtggattacctgaggtcaggagttcaagactagcctggccaatacggtaaaaccccgtctctactaaaaatacaaaaattagctgggtgtgatggtgggcgcctgtaatcccagctacttgggaggctgaggcaggagaatttcttgaacccaggaggcggaggttgcagtgaggcaagattgtaccactgtagtccagcctgggtgacagaataagactctgtctcggaaaaaaaaaaaaagaaaagaaaaaaagaaaatacgatcaagaacctcactttggccaggcgtggtggctcaggcctgtaatcccagcatgtttggaggccaaggcaggtggatcctttgagaccagcctgggctacatagcaacaccccatctcttaaaaaatagtaattttaaaaaacctcaaaaattagctggggatggtggtgtgcgcctgtagtcccagctgcctggaaggctgagaggtgggaggatcgcttgagtccaggaggcggaggtttctgtgagctgagatcacgccactgcactccagcctgggcaacagagtgagaccccatctcaaacaaacaaaaaacaaaaaaaatcacattcagccgggaatggcagctcacacagataatcccagcattttgggaggttgaggcaggaggattacttgagcctaggagttcaagagcagccatagcaaaaccctcatctctaccaaaaattaacaaactagccaggtgtggtggtgcgcaactgtcgtcccagctattttggaggcataggtgggcagattgcttgagtcccggaggtccaggctgcgctgagtccgggttgcactgttgcatcccagcctgggcaacagtgagttttgtctctcaaaagaaacaaacaaagggccgggcatggtggctcacgcctgtaatcccagcactttgggaggctgaggtgggcagatcacaaggtcaggagttcaagaccagcctggccaacatggtgaaaccccatctctactaaaaatacaaaaaattagccggacgtggtggcacgcactggaatcccagctacttgggacgctgaggcagaagaatcgctttaacctgggaggtggaggttgtggtgagctgagatggcaccattgcactccaggctggacaacagagcaaaactccacctcaaaaaaaaaaaaaaaaaaacaacactcatcacattcattccttttttctaagtatcatagattttttgcgtgtttgctttttgaaacggagtctggttctgtcgcccaggctggagtgtagtggtgtggtcttggttcactgcaacctctgcctcccaggttcaagagagtctcccacctcagcctcctgagtagctgagattacaggcatcccccaccatgcccggctaattttatattatttatttatttttgagacagtatcgctctgttgcccaggccggagtgcaatggtgcgatctcagcttactgcaacctctgcctccccggttgaagtgattctcctgcctcagcttcccgagtagctgggattaaaggcacctgccaccacacctggcttttttttttttttttttgagatggagtctcactctgacgtccaggctggagtgcagtggcgtggtctcggctcactgcaaactccgtctcccaggttcaagccactctgcctcggcctccggagtagctgggactcaggcgtccgccactacacctggctagttttttgtatttttagtagagatggggtttcaccgtgttagccaggatggtctcgatctcctgacctcataatccacccgcctcgggctcccacagttctgggatgaggcgtgagccaccgcgcccggcctgctctgtttttgagcttcacttctagatggctaaaggttcttttttgcctctaccttatctcccatttcacagtcttcagaacatgggtggcaacagcacgccactttctccgcctctccctgtcaaacttagcagggttaatggttattttcacattttcttctataccggccccctctcatcttttcatacctgtaagaggaacagaatttaacctggaagtccaggtcataaaatacgacagctggtatgaatactgtagactatataaaagaacacgccattcaacagggttttttttggttttgggttttgtttcagacagggtcttaccctgtcgctcaggctggagtgaagtggcacaatctcactgcaccgtcagcctcttgggttcaagcaactcttctgcctcagcggcctaagtggctgggattacaggcgcacaccaccacacccagctaatttttttttgtatttttagtagagacagtgtttcaccacgtgggccaggctggtttcaaactcctgatctcaaatgattccaccacctaggcctcccaagtgcgaggattacaggcataagccactgtacctggcctgctttcaggcctttatatgattcttatggtcccctcaaatcagtattttatgactcatactcatggagacctttaaaaatatcaccaggccagaggccgggcgcagtggctcacgcctgtaattccagcacactgggaggccgaggcgggtggatcacctgaggtcaagagttcaagaccagcctagccaacatggtgaaacaccatctctactaaaaatacaaaaattagcagggcctggtggcgtgcacctgtaatcccagctattcgggaggctgaggcaggagaatcgcttatacccgggaggcaaggttggagtaagctgagatcacgccactgccctccagcctggggcacaagaggaaaattttgtcttgaaaaaaaaaaaaatcacgaggccaggcgcggtggctcacgcctgtaatcccagtactttggggggccaaagtggatcacctgcggtcaggaggtttgagaccagcctggccaaaatggtgaaaccccatctctactaaaaatacaaaaattagccaggtatggtggcacgtgcctgtaatcccagctactcgggaggctgaggcaggagaatcgcttgaacacaggagacagaggttacaacgagctgagatagcgccactatactccagcctgcacaacaagagtgaaactccgtccccgccccccaccctgcgccccgccaaaaaaaaaaaaaaaaaaaaaggccggatacggtggctcatccctgtaatcctagcactttgggaggctgaggcaggcggatcacctgaggttgggagttccagaccagcctgaccaacatggagaaatcccgtttctactaaaaattcaaaattagccgggcatggtggcgcatgcctgtaatcccagctactcgggaggctgaggcaggagaattgcttgaacccaggaggtggaggttgcagtgagccaagaacgcagcactacactccagcctgggcaacaagagcgaaactccatctcaacaaaaataaataaataaataattaaaaaaaaatctgtgtctatatatatcaccattgattaatcccatcttttttttttttttccctgagatggagtcttgctctgtcacccaggctggagtgcagtggcgtgatctcggctaactacaatctccacttcacaggttcaagtaattcatctgcctcagcctcccgagtagctgggactataggtgcacgccacaacgcctggctaatttttgtattttattgattgattaattgagacagagtctcgctctgttgcccaggctggagtacggtggtgccatcttggatcactgcaagctctgcctcccgggttcaagcgattctcctgcctcagcctcccgtgcagctgggactacaggcgcgtgccaccacgcccggctaatttttcgtatttttagtggagaccgggtttcaccatgttagccaggatggtctcgatctcctgactttgtgatccacccacctcagcctcctaaagtgctgggattacaggcgtgagccatcatgcccagccagattttagtatttttagtagagacggagtttcactatgttggccaggctggtctcgaactcctgaccttctgatccgctcgcctctgcctcccaaggtgctgggattacaggcatgagccaccacacccggcctaatcccatctttaataagcacccactgagcttgtataattgtttatctaattatatgactgcaggctgctgaaggcacatacctcctatcccctaagcataaagatttacctctcgctgggtgcggtggtggctgaagcctgtaatcccagcactttaggaggcggaggcaggcggatcacccgaggtcaggaatttgagaccagcctggctaacatggtgaaaccccatttctactaaaaatacagtaaattagctgggcgtggtggtgcatgcctgtaaccccagctactcgggaggcagaggtaggagaattgcttgaacgtgggaggcggaagttgcagtgagccgagatcgcatcactgcaccccagcttaggtcacaagagcgaaactctgtctcaaaaaaaaaaaaagatttagttcttttgtgaaaaatattcaaagattacttttttgcaaaagatcaccaagccaaacatttggccatatttttatttactacatatactataaacatatacaatacatgctaccaaaaaaaatttttttttaaatttaactgtcaagaaagtgtatagtgttataatacaatggcacatgtttatattttatttcaaattggtttgcttatcacctatttcaaaccattaacagtgaaatgttacttgtggataattaaaaattatctatttgcattattaacaataaacaattccaacaaattaataagaattaaccatgtcaaatattagtattcaaaaaatgggatttgcagaaatgattatataaaatatagcagccaatttcagtttactttgccaataggatttcagcatttgcttttttttggaagacacttataagacatcctttgatttcttgaggggcattaactgccacactcaacagtcaaatccagcccagtggttcatgaacggccctggatcactgatcactgaggaatccttaggacttgagtagcgctgcctgttccactgatattacatatgatgaaaagagacattacaagccaatatcaaagtcaaaggaaaagaaaataggaacattcaaatcagttgtgacaaggtttttctacaagtatttttgatgccatactttcaggaaaacaagatttaatgtgtgtgtggactttacagtatctacgttctaactgaaaatttaacaaagcagtcagatggaattacatgtagtattacaaatgtgttcattcaacactaatgagcacccactctgtgcatagcactgggctaccattttacaagttgagtttaacgtctttatcaagcatgaccttagtgtgaggtaaaatacattaaattagcgtcaacgcgttagtctgcttgcggccatgtacggaatcctgggccagctggcttccctgtgccacgtcaccggtttctcaggtctcctcattcactcagacaaatacgtgcacactgactgtgtgtcagacagtgtgccggtcactcggacaccacaatctggtataggttcaaagaatgtaaatttatcattttaacctatgcagaacaattagaaaggcagattatttttccaaaatgaggtccaaagcaaactataaggtgtttctattggtcataccacaccagagaccggtaagtgcctttatagactgagaactaacgtggaagtttcatgctgtcgtctaaatagcctaggtcatttttggtctcataggtctattttgtggagcacctgaccccatataaatcattccatacttaaatgggtttgtaaactaaacctgaacataaacaaagagccaaaaatgaaggcagtttacaatgtaatgttcttcaacagcattactctccccatgagaaatgaataatacataagtaattcacaattggttcaacatttttttttcttttttttttccttttttttttttttgagactgagtcttgccctgtcgctcaggctggaacgcagtggtgcgatctcggctcactgcagcctccacctcccaggttgaagcaattctcctgcctcagcctcccgagtagctgggattacaggcgtgcaccaccacgccgggctaattttttatatctttagcagagatggggtttcactatgttggccaggctggtctcgaactcctgacctcatgatccacccgcctcggcctcccaaagtgctgggattacagacgtgagccaccgcgcccagccggttcaacattttttcaaagcactaaccctaccccaaattcatgtaatactaacttgacttttatacaagttgcacagaatgcagagggcagaatttgaccccaaaaccttccacagaatatcagaggtgattggtccttccactcttgagtagaacctaagaattccaagagtctcctaataggatactggccctctggagaaatggccctgctggatcccattagttaggactctagttagctgctgtagaagggtgacctactacgacccttttggggaaggcagagagctgggagactggctgtccacttagtgaatccaacactggcttaaagctatgcactgaataaagtgctcggtacatcctgcttttcacctggaatgaaaatacacacttatcttaggaattcacctacttacaggtttgggggacaagaatgtcaagggctaaaagaatcccaagaaaaagtatgaagcattgactaggagggaacaaatgcttctagtagtgttcttagaattcttaggatctgaaatgtcagaatgagtcacacgctggtcatgctccatacaatgaaagcaatcctgcttgatactattcacacggtgcatgattacttcacgggggtggaacggaacagtctgtcgccatttgatagtatggttccagaatgaaaacaaaaccactgaataaatcagggtaagcagtgtgtaacactccttcctgtccatcggttttccacagggtgatttgcactgcctgagagaaaggaggcaagatacctatcccttctgatacacacaggcacgaccactaccgcctccaattgccaattcagaagctaacacacaagccctccagttcgtaccctgaatatggtaattaagactaggaatggagcagttcagtctaaaaaatatcacaggtaacagaatgcttatataaactagactgcttttgacatctgtaagaaaattgtatagatggcagttggaaaaaaaaaaaaaagattgttcccatctgtcagcaaaactgttgaactatactcagctgaagtcctcatcgggattctgttgatccagcagacggacatgtgtgaatgggaagtgacctcgtttgccattacactccccttcccactgaccactcacattaatcttcgtaacctttaccagctcaccgacctgcaggaggagaataaggagagcactttatttccaggtaggaatgcaagctgaacaactccattctctggttaggcacaccctgcccatgtgactgctctagggatattacagaaatggccatttgctgcctccccagccccagccaccagactgattacttgtggttaatgcaggcagaaggaaaagtgtttttagcagtgtggaaaaacagagaatacagaaagtaaaagggattccagataatgatactttttgattaaaaaaggaaagtgataattattggaaatctcagctgtctctgcatgagcaatcccaacttcagtgagttagctactattccctttctttgtactcactaccctcagctttctgcctgctccgcaggccctgtccgaggagaagcagctttctccgtttttttttttttttttttttgagacggagtctctgtcacccaggctggatgacagtggcgtgatctcagctcactgcaagctctgcctcccaggttcgagcaattttcctgccacagcctcccgagtagctgggactacaggcgcctgccaccgtgcccagctaatttttgtatttttagtagagatggagtttcaccatcttggccaggctggtctcgaactcctgaccttgtgatccacctgccttggcctcccaaagtgcttggattacaggcgtgagccactgtgcctggccgccttctccccgctttagcatatggcagcagcacaatcccccagcccactcgcacaagacctggcctgttactgcttgcacagcagaaagcgatcatggcaagcataggtcacttggtcctagagaatcaagtgttcctatcacctcctgacccaggcaagccttttcccatatgggcaggtagaggccaaaactccaggtccaattagctcccagaaaacccccacctcattcagtaagctctacttcacaagccactgcctgcccagcccccaaatcccaccatcggacagaccttgctgctccctcaaagccgcttgttacctgatcattacccaatgaggggtcaaaaaaaccaaccatggccgggcgcagtggctgacgcctgcaatcccagcacttggtgagcctgacacaggtggatggattgcttcagctcaggagtttttgagaccagcctgagcaacatggtgaaaccgtctctacaaaaaatacaaaaattagctgggtgtggtggtggctgctcatagaaccagctactcgggaggctgaggtgggtggactgcttgagcccaggaggcagaggttgcagtgagccgagatcacatcactgcactccagcctgggcaacagagccagatcctgcctctaaaaacaaaaaaaaaccttatgttttggcatttatttataaaatgtctcttgttgcaaaatgaaatataaaggttttttttgtttgtttttttaagacagagtctcgatctgttgcccaggctggagtgcagtggcgctatctcagctcactgcaagctctgcctcccgggttcacgccattctcctgcctcagcctccctagtagctgggactacagccgcccgccaccacgcccagctaattttttgtattttgtttagtagagatggggtttcaccatgttagccaagatggtctcgatctcctgacctcgtgatccgcccgcctcggcctcccaaagtgctatgattacaggtgtgagccaccacgcctggccatctttttatcttttgtttttgagacagggtctcactctgtcactcaggctggagagcactgacaccatcatggctcactgcagcctgtaactcttgggctcatgggatcctccaaccttagcctcccgagtagctgagactacaggtgcacgccaccatgcccagctaattacaggcatgagcctccacaccatttatgcatttcatacagtatcaggaactttcaaattatgcatctgggcttgtactgggttccctaaaaatgtacgcaggcacatctactggccaaagccaacgtaagtccagccgcagggcctcttccaggcccagcctgacctcacttacagatggaacagcttgcctattggcccctctgttgtttcctgaagaactctctaaaaattacagaggcctgaagtcactgtatgggtcataggatgctgagaaaaggagggacagaaagaaggggatagagagacacataagacacagaggttgagaaaaaaatagcagcaggcttggtgcagtggctcatgcctgtaatcccagcactttgggaaactgaggtggggggatggcttgagcccatgattttgagagcagccctggcaaaagagtgagatcttgtctctacaaaaaaatttaaaaagccaagtgtggccaagcgtggccaagcgtgctggtgtgcgcctgtggtcccagttacttgggaggctgaggtaggaggtcacctgagcctcctgggaggtcaaggctgccccctagcctgggcaacaagaccctgtctgcaaaaaaagagaaaaccaagcagctaacccagcctgtgtcgtgacaatgccggctgagcacacgtgtggaggaaggagaggaagggatgatggcccagcctgtgtcgtgacgatgccagctgagcacaagtgtggaggaaggggaggaagggatgatggcatgcctatccttacacacaggtaacaatcctcacaggttgctgtcaccaggactctcaccacacctggcctgccagcaattttagaattcaacgtttctcacatctgggcagggtgctgtggggctcacgtctttaatcccagcactttgggaggcgaggtaggaggatcacttgagctcaggagttcaagaccagcctgggcaccatagtgaaacctcatttctacaaaaaataaaaaaattggctgggcgtggtggcgcacgcctataatctcagcactttgggaggtcgaggtgagtgaatcacgacgtcaggagttcaagaccagcctggccaaattggtgaaaccccgtctctactaaaatacaaaaattagccaggtgtggtggcaggcgcctgtaatcccagctacttgcgaggctgaggcagtgaactgcttgaacctgggaagaggaggttgcagtgagccgagactgtgccactgcactccagcctggccaacagagttacactgtctcaaaaaataaaataaataaataaattagccaggcatagtagtgtgcgcctgtggtcccagctactcaagaggctgacatgggaggatcacttgagcccgggaggcagagattgcagtgagccaagatagtaccagtgcactccagcctgggcgacagagcaaaactgtctccaaaaaaaaaaaaaaaaaaaaaaaaaaaaaaaaaaaaaaaaaagattctgacatgccccagccaggctaggcaacaatagcaagactgtgtctcttgaaaaaaaaaaaaaaattagtaaggtatcatcgtatgcacctgtagttccagttactcaggaggctgaggcaggaggatcacttgagcctgggagtttgagctgtagcaagccaagtgcaccactgcaccccaccctggtggagagaccaagattctgtctccaaaaaaaaaaaaaaaagaatcttggccgggcgcggtggctcacgcctgtaatcccagcactttgggaggctgagggcggcagatcatgaggtcaggagatccagaccatcctggctaacacggtgaaaccccgtctctactaaaaatacaaaaaattagccaggcgtgctggcgggcgcctgtagtcccacctactcgggaggctgaggcaggagaatggtgtgaacccaggaggcggagcttgcagtgagccgagatcacgccactgcactccagcctgggtaacagagcgagactcagtctcaaataaataaataaatacctcaatgttatattgtctttattctttttgtttgtttgagagagagtctcactctgtcacccaggctggagtgcagtgacgctatcttggctcactgcaacctccacctgccaggttcaaacaattctcctgcctcaggctctcaagtagctgggacgacaagcacaagccaccatgcccagccagtacttttttcgtatttttagtagagacggggtctcaccatgctgggcaggcttgtctcgaactcctgacctcatgacccgcccacctcggcttcccaaagtgctggaattacaggcatcagccaccgcgcccagcctatattgtctttattcttaagcattcatactgcagtctcaaatcacatcccacaaagctctaagaggtgaagggtaggttgaaaagtggaccagccccaccccttgctgttaacacagaaccataccaatttctcaaaatgtggggcaaaacctgctaatgtgcctccagatcttttctttcagacttttttttttttttttttaatggagtttttgctcttgtcacccaggctggagtgcagtggtacgatgctggctcactgcaacctccgcctccaggattcaaatgattctcctgcctcagcctccagagtagctgggactacaggcgcccgccaccacgcccagctgatttttgtatttttagtagagatggggtttcaccatggtgggcaggatggtctcgatctcctgacttcatgatctgcctacctcggcctcccaatgtgctgggattacaggtgtgagccaccgtgccagcccttctttcagacttctaagggataaatgagtagggatttctatgaggcaagatgttattggggaaaggaactatgtgtaaattagacctttggaccatatcagatcttttttttttttttttttttgagacagcgtctcactctgttgccctggctagagtacagtggcatgatctcagctcactgcaacctctgcctcccaggttcaagtgattctcctgcctcagcctcctgagtagctgggactacaggcatgtgccaccacgccctgctaatttttgtatttatagtagagatggggtttcaccatattggccaggctggtcttgaactcctgacctcgtgatctgctcacctcagcctcccaaagtgctgggattacaggcgtgagccaccacgcccggctcagaactatctttaatgtacagattctctctcttttttttttagatggagcctcactcttgtcacccaggctggagtccagtggcgcaatctcagctcactgcaacctccgcctcctgggttcaagcgattctcctgcctcagcctcctgagtagctgggattactggcgcacgccaccacgtccggctaattttttcgcatttttagtagagatggggtttcaccatgttggccaggctggtctccaactcctgacctcaggtgatccgcccaccttggcctcccaaagtgctgggattacaggtgtgagccaccgtgcccagccagattctcttggatctaccctgcagaggaaaaccatgccaaaatctaaaacttttttttttacaccgggtacgctggcctgcacctgtagtcccagctacttgggagactgaggggagaggaacccttgagtccagggtttttttttctttttgagacactgtattgatctctcacccaggctggagtgcagtggcacaatcttgtctcattgcaaactccgcctcctggagtcttgtgccttaggctcccaaggacctgggattataggcgcccgccaccatgctcagttaatttttgtatttttagtggagaccaggtttcaccacattggacagtctggtatgcaactcctgacttcaagtgatttgcccaactcggcctcccaaagtgctgggattataggcatgggccaccttgcccagctgagcccaggagtttgaggccttcctcagcagcacagtgaaactctgtctctcttaaaaaaaaaaaaaagaggccagacgcagtggctcacacctataatcccagtgctttgtgaggcccgagcaggaggaagattgcctgaagccaggagttcaagatcagtctaggttacaaagcaagactccatttctacaaaattaaaagtacaacattagccaggtacagtggaatgtgcctgtagtcccagctacttgggaggctgaggtagggggatcacaagcccaggagtttggggctgcagtgagctacaactgggcacccttgcttggggaacagagcaaagcctgatctcaaaaaaaaaaaagagaaaaacaaccaaaaacacgaatcttttctttacagatgattaggtttttggcagacaggttcaaatatacggagatgagataatggctatgccataactcaaatgatttttttttttttttaaagacagagtttcgcttttgttgcccaggctggagtgcagtggcacaatctcagctcactgcaacctccacctcccgggttcaagtgattctcctgcctcagcctcccacgtagttgggattacaggcgtgtgcccccacgcctggctaattttgtctttttcatagaaatggagtttcaaaatgttagtcaggctggtctcgaattcctgacctcaggtgaagagttcacccacctcgacctcccaaagtgctgggattacaggcgtgaaccactgtacctgggctcattctgattattagtattattttttgagacagagtctcgctctgtcgcccaggctggagtgcagtggcgcgatcttggctcactgcaagctccgcctcccgggttcacgccattctcctgcctcagcctcccgagtacctgggactacagatgcccgccaccacgtccggctaattttttgtattttttttttttttagtagagatgggatttcacagtattagccaggatggtctccatttcctgacctcgtgatccgcccgccttggcctcccaaagtgctgggattacaggcgtgagccaccacacccagcctgattctgatttttaaacggataaagaaaatttgtaagcaatcaattgggctaattaacctgaccaacgtggctttgaagtaaaaatacctcaaggaagaccttgttaaaattaaccctatggccgggcgctgtggctcatgcctgtaatcccagcactttgggaggccgaggtgggtggatcacgaggtcagcagatcgagaccatcctggctaacacggtgaaaccccgtctctactaaaaatacaaaaaaattaaccgggcgtggtagcaggcgcctgtagtcccagctgctagggaggctgaggcaggagaatagcgtgaaccctggaggcggagctcgcagtgagccgagatcacgcactgcactccagcctgggcgacagagtgagactccgtctcaaaacaaacaaacaaacaaacaaacaaattaaccctttgtgctttttggggcctttctcctgaaacgtttagagcacatgaaaatgctcctgaggtcccaaaggcactatgatgatatttagagaccaggtcttcctgtggtgccacatgtggccttaggtctttaacagtctggaggaaggagtggctgctgactctggctggaggagggcagaggaagaaggccggagggggtggggcattctaagaacattttgctccagtaaatgcagttcttcctccaattcagaaacaaagtcagaactgtgcttccacctgttaattcactaaagcataattcccaaagatcagatcagggaaggtgaggggtatcataccggggcggtggctcacgcctgtaatctcagcactttgggaggcagaggggagtgggtcacgaggtcaggagatcgagaccatcctggctaacacagtgaaaccccatctctactaaaaatacaaaagaaaaaaaaaagaaacttggtgtactagttttttttgaggcagagtctcactctgtcgcctagcctggactgcagtagcgcaatcatagctcactccagccttgacctcccaggctgaagccatcctcccatctcagtcactagagtatctgggactacaggcatgtgcaccacacttggctaattcttgtaatgatgggtttcaccatgttgaccagactagggtgtactacttcaaatacaaaggtgaaaccgagtgcttgccccagaactgttacaatctgacaatacaaaggaatgtactaatcagtgaatgtagtaataacagtagttctaacactactgatttcaaaattcaagttataaataggaaagaaaaatcctaatatgaattaccaatgaacaacaaagacttcatacaggacttgaagtactacaaggtagttaacctttctttccaagagggagacctcactacagcaaagagactgatgagtctcaccacagaggaactgttttactgtccaggctggtcctcagcctcctcatcctgtaacacattcttaggagcttcttacagctctgtgggatgggatttgagactgcactctgaatgtttaagaataaagacaacataggccaggcggggtggctcatgcctataatcccagcactttgggaggctgaggcaggcggatcgcttgaggccaggagtttgagactagcctggccaatgtggcgaaatcccatctctactaaaaataaaaaaattagccaggcgtggtggtggatgcctgtaatcccagctacccgggaggttgaggcacgagaatcacttgaacccaggaggcagagtgagatcacgccactgtactccagcctgggtgacagagtgagaccttgtcttaaaaaaaaaaaaaaaaaaaggccaggcgcggtggctcacgcctgtaatcccagcactttgggaggcgaaggcaggtggatcacgaggtcaggaggtcgagaccatcctggctaacacggtgaaacctcatctctactaaaaatataaaaaattagccaggcgtggtggcgggcgcctgtagtcccagctacttggggggctgaggcaggagaatggcatgagcccaggaggcggagcttgcagtgcgccgagatcacgccactgcactccagcctgggcaacaaagcgagactccgtctcaaaaaaaaaaaaaaaagaaaagaagaacaaagacaatataagattgaggtatttaaacagagtttgctatcaagtagaatggtggacttaagactatatcctaaagaaccacaatccacaaaacacctagaaaagttgactaaaatataacaagcatcctttcatcttcacttttttaggaagcaagtcccggctgtatcatggagtcattcataaagaagactgaatgtggttactacagtttctttgctcccaaggaacgtaacaaacactggctattccctagctctgtgtcgttttcaaggctaatcgatcctggtgcaatcagatctagaattggtacaggaacaaaagattacccagctgatcaatgcgttccagagataatgagaacaaaatcagaacccaaatggtatcaatgtttggaattcactacacaggggacatcacagaactggttttctttgctggcgcaaacccaggtgactgcttttctaggtccctactaccaaccagcagcacatcactgactgctaacatgccttgatccagacttgctttcagtgagctcagggcaggaagcacacacaaattcatacacacaaaaccagggaagagcaagtacagagaggcagcacaggagccttctcttccaacctcctaggctcaagcagttttcctacctcagcctcccaagcagctgagaccacaggtgcacaccaccacgcctggcttttttttttttttttttttttttttgagatggagtttcactcttgttgcccaggctgaagtgctatggcacgatctcagctcactgaaatctctgcctcccgggttcaagtgattctcctgtcttagcctcccgagtagctggaattacaggcgcccaccaccacgcctggctaatttttgtatttttagtacagacagggtttcatcatatcggtcaggctggtctcaaactcctgatctcaggtgatctgcctgcctcagccttccaaagtgctgagattacaggcgtgagccaccgcacccagcatgtatggttttttttttttttttttttttagatcacctggctaatttttaaaaacattttttgtagagaccggatctcaccatgttgcccaggctggtttcaaacacctggactcaagcgatcctcccacctcagcctccgaaagtgctgggattacaggcgtaagtcacagcacctggccaaacatcagcctgttgtttttgcagctttattggaacacagcaagctcatctgttgttttatctatgatttccttcttgctacaatggcagagttgggacacagaatttaaggccctcaaaaacctttacagaaaaggtttgcagacccctgatctaagtaacaggtagtgtatctagggcccatcgacagtctttcaaattgatggaaacaaatgaggacaattcagccttaacaattcacctgcatcagagatggactgaaactggcatgggtagtattggtggaaagctgccagtgtttgagatttaacagtccacatgaacagaaaaaacatcccacagaatcctgggagataggccttaccctggttctggtgtgagtcacaaagatctctagctcaactgataatgcctgaagctaagctccccatacccttgatgagcggtgaccacacatagtacatatgttttagctcaacataaagacatttctagaaattggccaggcacgacagctcacacctgtaatcccagcactttgggaggctgaggcgggtggatcacctgaggtcaggagtttgagaccagcctggccaacaaggtgaaaccctgtctctactaaaaatacaaaaattagccaggcacaatggggtatgcctgtaatcccaactactcaggagactgaggcaggggaatcacttgaacctgggaggcggaggttgcagtgagccgagatcgtgccattgcaccccagcctgggcgatggagtgagatttcgtctcaaaaagaaccaaaaaaaaaaaaaaaaatccaaaaaaacccaatacccaaatcaaaaaggaaaacttactaaaatcataaaactagttttctactcaaatctttatttaatgagatttgtgtttcacagcaggtagagaagctcaaccatttttttgagcagtaaagcctctaattaaggcaggcatgattaaatctctgagaaaggaaatgcaaatagaagcaaaattcacatgataactggtttctcctgggtcagctggcttgttccatggctttttttctttttctttttttgagacagagtctcaccctgtcgcccaggctggagtgcagtgtcatgatctcagctcacttcagccatgacctttcaggctcaggtgatcctccctcctcagcctcccaagtagctgggaccacaggcacgtgccaccatgcccagctaattttttgtagagatggtgttttgccatgttgcctaggccggtctccaactcctgagctcaagtgatctgcccacctcggcctcccaaggtgctgggattacaggtatgagccacacgcccagcctttgttccatgttttcatacttacttcaacccagtgctaataaagtctgtaataaatgtcaagagttacatctagtgactcagtaaggccagataaaaataaaaaaaagcagagaggaaaaaaaaaaaagaaaataaaaaggagtaagatccatcatacacacagcaccatgccagatgttaccgtcatctgaactcacaggaagacctgagggtagaaatctattttcctccaaacagggaatgggaacaagaggcagtgataactctgacaacatacattccatttctcattcaagccaggactgcaggtgcatgccaccacgcctggtgatttttttttttcactttttgttaaaaaaagctgaggtctatgtttcccagactggtcttgaacacctggtctcaagtggtcttcctgccttagcctcccagagcactaggattacaagtgtgagccactgtgcccagtctgtactagcttttacactgaaccatcaattcttctgaaaagaaaggaagggagagagggaggaaggaagaagaaaggaaggaggtaggagagcaaggtgtgagcgtggaagagaggaataaaggaattaacaccatgtaatggctggccagaaggaagtgggctgccaaagatatttcatcagtaaaggcaaaaattaattcctgaggaagaactggctttttgaatgatttagaaagacccgtgcacctgccactcctcggaatgaggacttctgggtgtgcatctcttcaaacctctactaggcctatttcctcccggattctactcaatgaacattagtggtaaggaacttcaagtcccctgaagcaaaaacaagtttttgcgggaaaattccatttaagtgctttgatagagaccacttattacactcaaatccatctgaacccaccttcttttagacaacgacaaacagaaagcaagaaacagatgaggatgtagatgaggaaaaacatttgaggttaattcctgtgaattcaggtggtgttattaaagtagtccaagtgtgtttagtagatcaattaagaacattcagttatacagttttaagcttactcattcccaaacaggttttctatgaagaagagaaaacccaacattcaatgccaacatcagtgcttagcggcttgccatctacaacatcccaatgctgtagtcagcattgctacaaagctctaagaggaccgagaggagaccctgcagcagatctcttctttctacattgtgcacgttatgtacctccaaagccaaggctgtcttgtcgtaggcattggggactcgcttctggataaccctggcatatatgggcccattctggaggttagggagcggagtgttgacgctgggttgggcatagggcccaggctccggcccacccagtggctgtgggtgggaaccctcctggttacctccaatcagagccgatactgaggcggaggcaggtctatacttctcgacgtaagggactggaatcatccctctcttgccttcgctgtcctccgcattccaccactgctcttcaggcttgtcccggattctcaagatgtctcctttcttaaagggaagatcttcctcatcattcccattaaagtcaaagagggctcgcacatactccgcctcctcctgcctgagaatcactccactaccctgcctggatctggaaactggttctatcaacgttgtagtgtccaaatagtgtattttgtagaattccagtaaagcaggcaatgaatcaaactcttgatctcctattcggagtctggaggggctcacccctggaaaaaacagagcaggctgttatttaatgatgtactacactggaaatgaaatgcagattttatttttattttttttagagttgggatctcactatgttacccaggctggtcttgacctccggggctcaagtgatcctctcaccacaaactcctgagtagctgggactacaggagcccaccactgtgcctggccgaaatggagctttcatgcatgcctcatacacatttagtcaagatttaatcagcaaaaaaaactctagaaaaaataaccccttctcttcacagcacaccaacatcacatttggaagctgaaacatcccctgggaagaaagatgcccatcactacagccccagggaaggatgaggaggccaggagactaggctgatcaggacgtgctctcatacttgatcaacgacgggggctttcactgcattctccaaatatgttctgtcgctaccccatttacagagcagtgtaagcctcaaggttctgttgcatgtttttttttttttgagaccaaatctcactgtgtcgcccaggctggagtgtagtggcgtgatctctgctcactgcaacctctgcctcccgggttcaagcgattctcccgtctcagcctcctgagtagctaggattacaggctcccaccaccatgacaagctaatttttttttttttttttgtatttttagtagagacggggtttcaccatgttggccaggctggtctcaaactcctgatctcaggtgatccacccacctcagcctcccaaagtgctgggattacaggtgtgagctactgcgcctggcctgcatctacttttcaacctcaggaaatgtagcaagctcttgtttttcatgggtccctgctgctgttcagaaggtggagagagcttgtgtctgcactgagctcacacattttttctcttcacatctagaatgtataattccgaagaagaaaaactatctcttgttgtggttttcgttgtttttgggacagagtctcgctgtgtcgctcaagctggagtgcagtggcacaatcacagcttactgcagccttgacctcccaggctcaagtaatcctcccacttcagcctcctgagcagctgggactacaggcacgctcaaccatatctgggtaatttttaaatattttgtagagatggggtttcactatgttgcccaggctagtctcaaacacctgggctcaagcaatccttcggcctcaaccttccaaagtgttgggattacagggatgagccacagtgcctggcctctggtatctttttaaatctaagataggtgatctcaattttatctttgacagctaaaaggtaaaagaaccaagaagctgaactgaaaaactaaggggctaactgcttaaaaatcaattcccgagatcgtaaataaaacagaaactagactgttcgctatgaagcaaacaggtcattaaaaaaaaaatgcttggggaaataaagggttaaaacactcaacatctgataacacactgaggatccagagaaagaacatattacaaacgcttaaaattcctaagacacgagtgtgtatggtggccctacataccatagttcagaatggatttattctatgctgagattctaaaactcaaggaaaataaatgaacacagtcaaacaaaacgagtaaattcaaacaagagtcaaagtttctttaaaaaaaaaaaaatgagtcagggttttgctgtgtcacgcaggctggagtgcagtggcatgatcatagctaactgcagcctcagcctcaagcaagcctcccacccagcctcacgaatagcttcaaatacaggcacacgccaccacgcccggctaatttttgtattttttgtagagatggggtttcaccacgttgcccagactggtgaactcccgggattgttaggatttcggcttccccaagttttgggatcataggtgtgggacaccacgacggagtctcgctctgtcccccaggctggcgtgcagtggcacaatctcgactcagtgcaagcttcgcctcccgggttcacgtcattctcctgcctcagcctcccgagtagctgggactacaggcacccgccaccatgcctggctaattttttttgtatttttaatagagacggggttttaccgtgttagccaggatggtctcgatctcctgacctagtgatccacccgcctcggcctcccaaagtgctgggattgattacaggtgtgggccactgcacccggccacaaagtttctaattaggaatgcaaacctttaactcccactcggctaagcacccaaaacagcaaactattttcattggatttttcacattatggtttcctgaagaagtaataaacaactctctaataataacaactagtaaacattctccatagagaatgagttttagctgggcacggttgctcacatctctaaccccagcacttagggaagctgaggcaggtggatccctggagctcaggagttcaagaccaacccgggcaacatggctgtcactgcaaaaaacttaaaaaattagctgggcatggtggcacacttttgtagtcccagctactcaggacactcaggtagggggatggcttgagcctggaaggtcaaggctacagtgagccatgatcacgccactgcactccagcctgggcaacagagcaagactctgtgtcaaacaaacaaaaaaaagaaaatgaattttgttgggcgtggtgcctcacacctgtaatcctagaactttaggaggctgaggtgggaggatcacttaagtgcaggattttgagaccagcgtaggcaacacagccaagacctcatcactacaaaaattatttaaaaattagccaggttggacaggcgcggtggctcacgcctgtaatcccagcactttgggaggctgaggcaggtggatcacaaggtcaggagatcaagaccatcctggctaacacggtgaaaccccgtctctactaaaaatacaaaaaattagctgggcgtggtggtgggcacctgtagtcccagctgctagggaggctgaggcaggagaatggcatgaacccaggaggcagagcttgcggtgagccgagatcgcgccactgcactccagcctgggcgacagagcgggactctgtctcaaaaaaaaaaaaaaaattagccaggcatagtggtgcatgcctgcagttgcagctacttgggaggctgaggtgagagatcgcttgagcctaggagtttgtgagtacactgagccatgatcgtgtcaacgcactccagcctgggggaccgagcaagaccttgactcttaaaaaaagaaaaaataaatgtttgaaaaaaaatgactgggcacagtggtttacgtctgtaatcccagcactttgggaggccaaggcaggaggactgattgaggccagtagttcaagaccagcctgggcaataaagtgagacccaatctcctaaaaaaacaaaaaacaagccgggcacgtggctcacacctgtaatcccagcactttgggaggccgaggcgggtggatcatgaggacaggagagcgagacttcgtctcaaaaacaaacaaacaaacaaacaaaaaaaccattagccaggcaaggtggtgcatgtctgttagtcccagcttctcgagaagctgaggtgggagaatcgcctgagcccagggagtcaaggctaccgtgagtcgtgatcatgccactgcattccagcctgggcaaaagagagagaccttgtctcaaaaaacctaaaatccaaatgagttttgtgagtttttggctttgttgttgtcttgtgacagagtggtctggctctgtcacccaggcgggagtgcagacctcagctgagtgcaacctctacctcccaggctgaagccatcctcttacctcagcctcctgagtagctgggcctacaggcacgcatcaccacgcccaactaattttttgtagtaatgggatttcgccatgttgcccaagccagtctcgaattcctgagctcaagttatccatctgccttggcctcccaaagtgctagtattacaggcgtgagccaccacgcctggccttggctttgttttttgagacaggagactccctatgtggcccaggctcatcttaaactcctgggtccagcgatcctctcaccttagtctcctgagtacatgattttgttatttctttttagagacagggtctaactctgttgtccaagctggagtgcagtagtgtgatcacagctcaccgcagtctcaaactcctgggctcaagatattctcccacctcagccttctgagtagctgggactaaaggtgcgggtggcattgcacccagctgatttttttttttgagatggagtcacattcttgtcacccaggctggagtgcactggagccatcttggctcacggcaacctccacctcccgggttcaagcaactctcctgcctcagcctcccgagtagctgggactacaggcccgcgccaccacacccggctaatttttgtatttttagtagagacaaggtttcaccatcttggccaggctggtctacaactcctgacctcgtgatccatccacctcggcctcccaaagtgctgggattacaggcgtgagccactgtgcccggcccttcacccagctgattttgaaattttttttatagagacagtgtcttgctttactgcccaggctgcggttttgtttttgttttctgagatagggtctggctctgtggcccaggctggagtgcagtggcatgatcttggctcactgaaacctccacttcctgggctcaagccattctttcacctcagcctcccaagtcgctgggactacaggcatgcactaccatgcctgtatttttttttgtattttttgtagagacagggtttcaccatgttgcccaggctggtcttgaactcctgagctccagagatccacttgcctctgcctccgaaagtgctgggtttagaggtgtgagccagggcgcccggcctgttttttttttttttgagacagggtcttgttctgtcacccaggcaggggtgcagtggcataatctcagctcactgcagcctccacttcctaggctctagtaatcctcccacctcagcctcctgagcaactgggactataggcgcacaccacacctggccagtttttgtattttttgtggagatggggttttgctatgttgcccacgctggtctcaaactcctgggctcaagtgatcggcccaccttggcctcccagagtactgagattgcagatgtgcaccactgcagtactgagattgcagatgtgagccagtgccgtactgagattacagatgtgagccactgcatccagcctattattaattttaattatatgtgagccactgcatccagccattattaattttaattatttgcttattgggatttttcttgtgtgtgaaagggtcttttttttttttttttttgaagacagagtcttgctctgtctcccaagctggagtgcagtggctggatgtcggctcactgcaacctccaccctctgtgttcaagcaattcttctgcctcagcgccccaagtagctgggatacaggtgtgtgccaccatgcctggctaatttttgtaatttcagtagagacacagtttcaccatgttggcctggctggtctcaaactcctgacctcaagtgatctgaccgccttggcctccaaaagtgctgggatgacaggcgtgagccactgtgcctggtatgtgacagggtctcactctgctgtccaggctggagtgcagtggcgcaaactcagctcacagcaacctccctttctttcttttttttttttgagacggactcttgctctgttgcccaggctggagtgcagtggtgcgatcctggctcactgcaacctctctctcctgggttcaagtgattctcttgcctcagcttcccaagtaactgagattacaggcggccaccacgacaccaaggtaattttttatatttttagtagagatgggggtttcaccacgttggcaaggctggtctcgaactcctgacctcaggtgatcccaccgacttcagcctctcaaagtgttgggattacaggtgtgagccactgcacccggccgcagcctccactttctaggcttaagcaattctacagtctcagcctcccaaatagctgggactataggcacaagccacccaccaacacacagctaatttttgtattttttatttttactttattatcatttttttgagacagagtctcactgttgcccaggatggagggcagtggtgcaatcttggctcactgcaagctctgcctcccaggttcacgccattctcctgcctcagcctcccaagtagctgggactacaggcgcccgccaccacgcccggctaatttttttttgtattttttagtagagacggggtttcaccatgttagccaggatggtttcgatctcctgacctcgtgatccacccacctcggcctcctaaagtgctggaattacaggcgtgagccaccgcgcccagccccacttttttttattttttgagatggagtctctttctgttgcccaggctggagtgcagtggcaggatctcggctcaatgcaacctctgcctcctgggttcatgcaattctcctgcctcagcctcccaagtagctgggattataggcacccgccaccacgcccggctaatttttttgtatttttagtagagatggagtttcaccatattggccaggctggtcttgaactcctgaccttgtgatccgcccgcctcggcctcccaaagtgctgggattacaggcgtgagccaccccgcctggcctattttttttttttaataacggggttttgccatgtcgcccaggcaggtcttgatctcctgagctcaaagtaatcctcttcccccttggcctcccaaagtgttgggattataggcatgagccaccgtgcctggtcttgttaattttgagagcaggtttttgctgcccaagctaaactgcagtagctatgcacagacaccatcactgcacactgtggccttgtactcctggcctggagtcatcctcctgcctcagactcctgggtagctgggaccataggtgtgcaccaccacgcccagctaaagacctaattatttcgttcaatgttagaaacatcctggctaacacacagtaagaacccatctctaccgaaaaaaatacaaacgccaggcagggtggtgcgcgcctttagtcccagctacttcggaggctgaggtggattgcttgaacctgggaggcggagcctgcagtgagtcaagactgcgccactgccctccagcctgggtaacagagggagagcctgtctcaattaaaaaaataaaaaaagctgggcgtggtggctcaggcctgtaatcccagcactttgggaagccgaagcggggggggggatcacctgagatcgggagttcgagagcagcctgaccaacatggagaaaccccgtctttactaaaaaaaaaaatacaaaattagccaggcgtgagtctcatgcctgtaatcccagctacttgggaggctgaggcaggagaatcgctggaacccgggaggtggaggctgcggtgagctgagatcgcaccattgcactccagcctgggcaacaagagcagaactccatctcaaaagaaaaaaaaaaaaaaaagaatggcataggggccaggcacgatggctcatgcctgtaatcccagcactctgggaggccgaggcaggcggatcacgaggtcaggagatccagaccaccctggctaacatggtgaaaccctgtctctactaaaaatacaaaaaattagccgggcatggtggcgggcgcctgtagtcccagctactcgggaggctgaggcaggagaatggcatgaacctgggaggcagagcttgcagtgagccaagatcgcgccactgtactccagcctgggcgacagagcgagacaccgtcaaaaaaaaaaaaaaatcattccactattggagagaggtaataagacacaatgttaactttggaagccaatgaaaagtccttccggtagaaagagtactgatgagtgccttctctttccatccaaatgaatgatgagaccatctgaaggagagccgtacatttttcatattacccaaagtccacctgtggaattcacagctgtcagcttaaaacagtgaacagcccagactcaggaatactggctgtctctccaatttaagacactgaaaggggtgcgagtgccaggactgtcctctatggcaaacactcctcatgcaccaatagaagatgatcgcaaaagttccgagggcaggactggagaggggattttggttatgactgtagcagagcacggaggtgctatattctggagattctctttattgaggaggatcactgatggagaataattcctattcaagtctggtagtcaaggagattcatggctaccttgcctatcaccattaggctaattctgggtgatctttcaggcctatggagaaactgtttaggacagggtcagtgtgagcgcatagggacctacttagcactgcctggtcaagaaaactctagggcagagtggtaaggaggccacctgggcacccatggcttagaaatggttctgatcacagctgggtggagaaaagctcccttgctaaggtttacccaactacatgccaaggtgttctattagttgtccttttgggacagtggttggcaggtcagtgctcagttaagtgttgctaatttttatatttttagaagagatggggtttcaccatgttggccaggatggtcttgatctcttgaccttgtgatctgcctgcctcggcctcccaaagtactgggatgacaggcatgagccaccgcgcccagccagatattatcttaataagcctaactctgaagtgatggaaagaagctaagcacaatgccttcctagactggagaagctcagagaagttcacagcattgttggagataacacagcaagcacagtgtggctggtgaacaaggagaaagcggcacgtcttaggaagacaacctcccacccggctttcaccttcacctggatctatgttcctgctaaagacagttggaataacgcactgtgtcctgagatacaacagaatcgccatgagcaactacgaccatctgtgaacacttccaaggtactctctccactggaagaaggaaggtaaccaccccctgccagccactgttaccatagcaggccgagcgaaatacattttggcggggaaagaacaaatgagactactaagccaagtcgctctgaaagatgagtgagagaaaacttggcagatcatctggcgcaaaggtaggaagcaggtttaattctcttcttggtcaaatgccacaatagcgtgaactgggctcactatgactttttttttttttttttttgaggcggagtctcgctctttcgcctaggctggactgcagtggcgccatctcggctcactgcaagctccgcttcctgggttcacgccattctcctgcctcagcctcccgagcagctgggactacaggtgcccgccaccacgcccgggtttttttttctgtatttctagtagagacggggtttcaccgtgttaaccaggatggtctcgatctcctgacctcgtgatccgcccgcctcggcctcccaaagtgctgggattacaggcgtgagccaccacgcccggccgtgactttctttttgtttggcaatcccaatagacacagaaacgtaagcaaaacgccacggaaaacctttgatgtactttacttataaattatttttctattctgacactgtaataatttcacagagaaatgcccgtttctgtgaactgctgggggccatcaagcttcattgatccaaactccagaaggaagggaggagaacagaacacacataagtcccagataagcccaaacctcaccatggctgtgtgttccggctccttttctctctttcctctccttccaaccacaaacagccaaaggcaggaaatagaagggcgggaaaggaaggaggcacagtcagccagtctagagaacagaagcaacgacaggattctcatagctatctgggacttggaaaacctcaatgacttgttctacatcaccctgtgctggattctgaacgtggagttaggaagtcacacaaacggaaatcaaaatcaatgcaaggagaggatatcctttcagcttctcggtacctgctcagcccgttacttctaagccttccaagcatttcaagcctcaggttacgaccatttttacaaggccactccctccctgaaggtttcatgaagaacacctgagggctctgtgggctaaaataggcccaatcacttctgacgggtctacaagagcgggccaggctctccttgatctcacagcactttctcttttcctttttttttttttttttttgagacggagtctccctctgttgcccaggctggagtacagtggtgcgatctcagctcactgcaacctctgcctcctgcctcctgggttcaagcaattctcccttccttagcctctcgagtagctgggattacaggcgcccaccaccacacctggctaattcttgtatttttaggaaagacagggttttgccatgttggccaggctggtctcgaactcctgacctcaagtgatcagccagcctcagcctcccaaagtgctgggattacaggcgcgagccaccacacccggccctcttttcccttttttcctcaattcttgctccctcccttccttctctgcctgtggtatttacaggggttgcttagataaatacccaccaatacaaaacgctaaaaaggccactggctcgggaggctgaggcaggagaatcgcttgaacccgggaggcggaacttgcagtgagcagagatcgcgccactgcactccagcctgggcgacagaaggccactggtttccatctgagaagatatatggtctcctaagcaaatagaatgttctaaagatggtgggtatgaggacggtcctttgcaggtttggtgcattgtggctctcattttctagctgtctgagttacctaacttctgtgtgcctcacccccgactctgcaaaatggggtcaaatacctatctaataaataaagttcctaaagtggctagaggctgggcgtgggggttcacgcctgtaatcccagtactttgggtggcagagccaggcaaatcactgaggtcaggagttcaagaccagcctgatcaacatggtgaaacccatctctactaaaaatgcaaaaattagctgggcatggtggtgcacgcctgtagtcccagctgctggggaggctgaggcaggagaactgcctgaacctgggaggcagagcttgcagtgagccgagaatatgccattgcactccagcctgggtgagagcaagactccatctcaaaaaaaaaaaaaaaaaaaaaagaaaaagtggctcgtacattataggtgctcaataaaaagcaaccaattctccaaattccttcagcaattttcaattcatcctcaaatccagagcccactggaccgtttcccagagaaaattccacaggatctcaagatgcttctcaaaagttctgtggtcaggcaggtgcggtggctcacacctgtaatctcagcactttgggaggctgaggcaggaggatctctttatttttttctctatttttaaaaactgattaaccaatctttagggagacatctgttgaggccaggagtgcaagcccagcctgggtcatacagtgaggctgtagtgagctatgacggagccactgcacaccagcctgagcaacagggccatcagcagtctcacgctacctccagaagtggcttggcccagctgccagcctggcatgtagctcttcactacctcgagggagtatcacaaactattaccaccctagcttctgtcccacgccttcaaaatgaagcacgttttatgcccccctccacccactagcgcaacaggtcggatgagcaggtaacaggaggcaccatcttatttccaagtgctggacccgaggtcctttcacacttacggatgcactccacccaggcacctactccccaagacaaactgtttcaccagttcctaccatccacagcatgaattccacagcctctcaaagataagaagttttccattttgcttcaaaagcccccacacctcagttatgttattaagattcgtatacatgaaatgcttatggagtacttagtatgccagtactgaatatggagtatcattccaacaaccctatgagatcagtattactatttccctccttcacagatgaggaaactgaagcagggaaaagttaaacaatttgcccaaagttacacaagcagtaagtggtaggtaaataaggcccaacccaggatccacagctcaagcttataacgactctcctaactcacactccttcagctgtgtcaacctgaaaggtttagctgttcaagagaaaaaaaactagtttcttgcaagcattccaaggaggtccatcttgaagcccaacctgacagaatgtgaccagtagacttggccaagcccttccttatggccccagggaactcccaagctatggcaccacaggaagcctatgcaagctgaggacccaagacaagttaaaaacaggttcaacggaaaaggctgagaatcactggcccattctgtacccatgcctttaaaaataatacccagctgcgcacggtggctcacgcctgtaatcctaacactttgggaggtcaaggcaggtggattacttgaggtcaggagatcgagaccagcctggccaacatggtgaaacccccatctctactaaaaatacaaaaaaattagctgggagtggtggcgcatgcctgtaatcccagctacctactcaagaggctgaggcaggagaatggcttgacccgggagggggaggttgcagtgagctgagatcgtcccactgcactccagcctgggcaacagagcaagactctgtctcaaaacataaataaagtttaaaaaataaggcgcggtggctcaggcctgtaatcccagcactttgggaggccaaggtgggcggatcacgaggtcaggagctcaagaccatcctggctaacacggtgaaacacctctctactaaaaatacaaaaaattagccgggcatagtggcgggcgcctgtagtcccagctgctcaggaggctgagggaggagaatgacgtgaacccggcaggcggagctttcagtgagccgagatcgcgccactgccctccggcccggcgtgggcgacagagcgagattctgtctcaaaaaaagaaaaaaaacacataaaaatgacacctaagccattccatataattttcacctatgcactgtgtaaacaaaatatactctgtaggctagatgcgatggctcacacctgtaatcccagcactttggggaagccgaggcgagcggatcacttgaggccaggagttcaagaccagcctggacaacgtggcaaaaccccgtctgtactaaaaatacaaaaaaattggctgggcatggtggcgcatgcctgtaatcccagctatttgggagactaaggcaggagaactgcttgaacccaggaggtggagggtacagtgagctgagatcgcgccactgcactccagacggggcaacaagagcgaaactccctctcaaacaaaacaaaacaaaacaaataggccgggcgcggtggctcacacctgtaatcccagcactttaggaggccgaggcaggcagatcacaaggtcaggagatcgagaccatcctggctaacacggtgaaaccccatctccactaaaaatacaaaaaattagccgggcgtggtggcgggcgcctgtagtcccagctactcgggaggctgaggtaggagaatggcatgaaccccacggggcggagcttgcagtgagccgaggtcgtgccactatactccagcctcggtgacagagcgagaaactgtctcaaaaaaaaaaaaaaaaaaagcaataacaattttaaaaagcttcttcatcattgactttagatagcagatgtgtattgtctgaataataaagccagtggcacgatctcagctcactgcaacctctgcctccggggttcaagcgattctcgtgccttagcctctccagcagctaggattacaggcgtccgccaccacgcccagctaatttttgtattttttagtagaaacaaggtttcaccatgttggccaggctggtctcgaactcttgacctcaagtgatccaccctccttggcctctcaaagtgctggaattacaggcatgagccactgcgcccggcctcttcttgccattctttaattctggtctttaaaaaacctgggctggatgcggctgtatgtgcctgtagtcccagctactcacagcctgagtcagaagggctgcctgccccaaagttaagggctgtagtgcactatgactgtgcctgtcaacagccactgcactccagtttgggcaacatagtggggggaaaaaaaaacaaaaaacacaaggccgaggtgggcggatcacctgaggtcaggagttcgagaccagcctggccaacatggtgaaaccccgtgtctactaaaaatacaaaaaaaaaaattagctgggcacagtggcacatgcctgtaatcccagctactcgggaggctgaggcaggagaatcacttgaacctgggaagcagaggtttcagtgagccgagactgcaccactgcactgtagcagcccggggggcaagagcgaaactccatccaaaaacaacaaaacaaaaaacaccaagtcttagactccagggcagaggcaaagtattgaggatattgaggatacggacctctatgtgcactgctgagatgccaaaagaacgctggctttgagagtgtagtgtaaaagggtcagctctcaggtcagaatgcctaggttcaacttctgaaagtcatttattagttgtgtgaccttaagcaagttactgaatctatgagtgtttcctcctgtataaaatgggaatattttaataaatggagatcatattacttatctcactagattgtcctagacagtaagtgaaataaggtacataaagtactcaaagtacctggcacagaataaccagtcaataaacattagttattaatattctatacgcctctctaaaaaattcaagaaatttctctgtgtgacttcaaaaggacttggtgagggggagaacaaagattcagtacttagtacttgagatttgtgaggtacaaagtaattctgaggttatacagacaggccaggcgctggtggctcacgtctgtaatcccagcactttgggaggccgaggtgggtggatgatcagagttcagcagttcgagaccagcctggccaacatggtgaaaccccatctctactaaaaaaatacaaaaattagctgagcatggtggtgggcgcctgtaattccagctactcaggaggctgaggcaggagaattgattaaacctagaaggcagaggttgcagtgggccaatatcgcgccattgcgctccagcgtgggagacaagagtaaaaactcggtctcaaaaagaaaaaaaaaaaaaaagacagcaactgaccaggcacagtggctcacacctgcagttccaaaactttgggagcctgaagcatgaagtctattgagatcaggaatttgagaccagcctggacaataccgtgagacccctcatctctacaaaaaaattttcaacagttaaccaggcatggtggatacgcctggagtcccagctactcaggaggatgaagtgggaggatggcttgagcccaggaggtcaaggctgcagtgagctgtgttcatgccactgcactccagcttgggtgacagaggctctgtctcagaagagagaaaaagacagcaactgaatcgtagaaaatggggtacaacatggcagaaagaattatcacaatactcgtgaattttccacaccccatccataaactttggcaatcttcaccgtctttcctcagccaaggaactgagttcttatctgttttgaaaaggtggtgctcgattatcacggtaagtgttgagacataaaatcgttatgctaagatatgaaaaaatatcaaactaacaaacctgcctgctgccattttcaactttggcaaccaacaaacacaaacaaaaggctgaaaagtgagtttcaatgacagtttgccatcatgtgacgacatataatgcaaaaccccagatactatgcaggtggcatcaaagtagaatatatctggttcagggccaacacaggtacatcaatattcccatctcataatactattaaacaggccacaatgagaaagatctaggataatttgtgagcttatagaccccatactcatttttaaaaaatggttgtgttagactgggtgtggtggctcacgcctgtaatcccaacactttgggagtctgaggtgggcagatcacctgaggtcaggagttcgagaccagcctggtcaacttggcgaaaccccaaccctactaaaaatacaaaaactagccaggcgtagtggagtgtgcctgtaatcccagctactagggaggctgagacaggagaatcctttgaacccggggaggtagagattgcagtgagctgagattgcaccatcgcactccagcctgggcaacaaaagcgaaactccgcctcaaacaaacaaagctgggtgcggtggcccacgcctgtaatcccagcattttgggaggcaaaggcgagtggatcacctgagatcaggagttcaagaccaatctggccaacctggtaaaaccccatctctactaaaaatacaaaaaattagctgggcgtggtggtgatgcacaccagcaatcccagctactcaggaggctgaggcagaatcacttgaacccaaaaggcaaaggttgcagtgagccaagatcgcgccactgcactccagcctgggcgacagagagactccgtctcaaaataaataaataagtaagaaataaataagaaaaattttaaaaaaattagtatgtgttggccaggcgcggtggctcttgcctgtaatcccagcactttgggaggccgaggctggtggatcacctgaggtcaggagttcgagaccagcctggccaacctggtgaaacttcgtctctacgaaaaatacaacattagctggttatggtggcgggtgcctgtaatcccagctacttgggagactgagacaggagaatcgccgtgagccgagattgcgccactgtgctccagcgtgggtgacagagcaagactccgtcttagaaaagagtaaaataaaaattggtgtgtgttaacaaagagactgcctatccaattctctatttctggccggagcgagtaaatctaaattagaactattctacaagggcaagtctacaaaggacggctcaagagcttcctgattcatatgagactagtctgaacccattctcagctggccaagaagaaactgcttcgacttggcaacagcgtgaaggcacgaggactcctgatgctgttacacaggtacacatacaatgagaaccccagaattactttgtacctcacaaatctccagtactaagggcatctatctattcccttaaaacagtcccaaatcaactccaacggcatcggtaagacagtcaatctcagggatccctccctggcaaggaaaacccagcgcaggtaatttatgttcttggcgtagagtctgttcccaatatccaggaagactcagcccgcagccccatcttactgagcaaggtgacgccctgaagtacacaccgacaatgtttaagtccaaggaaaatgaagttccagtcacttacagggaagggtctgtttccattgcctcacttctggtttattttgtggaataaaatgtctttcctccactaaacactttgaaaaccagaactctctaacggcggacagtcttctggacgcttagatctcttgcacatagccaggcatcgccttaaactgggttgggctggtcactgaaggctttctgctaccactatttcttctagcacttagttcaccaccttcgtcctccacgggggaagagaacggtacaaagattttggaaaaatgcccaagaaaggaaaaaattgaccggtttcctgagggtgtctccatccctcccggccagtatgtggtgacttcctaccaaaggccaccaggggagcacggccaaacccggctctccaacacggcaggaaacgtttccagcctaaaagccacttgtaggattatcggattcattctgggcgccgctgccaagtgatgcccccgcagtgccaacatctccctcagctctttgtccccacgttgccttgccctgccctacccttgcgcctggcccgggagccagccccaccctggggccgaagcagttccccttccccgcggctgccctccccaggcacaccccggggcctcggtccgcggctcctcctcccccacactcctgctccccgggtgagagcgagcccgagcagccggcgggcccctgccacggtcacccagccctctgcccacgacccccgagggtccgctctcgaggaccagccagccaggctgggagttccgcggccctcaccccgcccagggcccgccgtcccgtcagtccctcaccgggcggaggctgggcgggcgacggtggcaccggcgggcgcgggccgctgctgttgatgatgtagtgggagacgcgcgagttctctgagacgctgagcacatagtccccggggctggtgctcgagtcccgcaccaggaacaccccgtgccgctggccctgcagcagcgccaccgcctcctgccgactcaacctcccccagtaccagctactccgctcctccgagtcgaagttgcccgccatggctgcctccgcgcctaaacgctggggtgccgccgccgcgcgcgcccctccggcccccggcgcccgccgcccagcggaccggctccggtttcagcttcacagcagcgcccgaaatggcggcggcagccgcgggcctccccctccggaaatgacgcgctccctgcccgagggaggctgccgggaaggggcccgcggcccgccattgggagaagggcaaggcgccctcgcgcgcgcactgcgcatgcggattcatgggcggtgccgcccttcccgggcccgggctgcgggggatgggaggcggggtctagggcccgaggggcggggcctcgcagcctcccgcagagacgcgcgcctgcgctgcggacagagcggtgcttctcgtctgggccccggttcctggacgacctgggacttctaggcagcgactcccagacagaattggaggagaaaagatgcgtgtggccctggggcctgagttctcggccaggcttcctgcgatatcagtctgtttcttttttctttttctttttgagacggagtcttgttctgtcgcccacgctggagtgcaatggcgcgatctcggctcactgctcccgggttcaagcgattctcctgcgtcagcctcccgagtagctgagactacaggcgtgagccaccgcgcccggctgttttttgtatttttagtagagacgggggtttcaccatgtcggccaggatggtctcaatctcctgacctcaggtgatccgcccgcctcggcctcccaaagtgctgggattacaggcgagaaacatcgcgcccggccacgtcggtccgtttctgctcgttcctctagcttctccacagaccagctgacgttctcattttcattgattcacctaggacattgttgttgacactccacttgcactgcgggtgcaaaggttatcatggctgggccctgcactcctcgaactcacagaccagtgagaggaaccaggaaactggatgacaaaaggatgacaaatgctgacaaacgctatcatgggaaacggacatgaacacagagcagagcccccacagccagtctatggagtaatccaggagggcttcccagaggaggcagcatgtgttgactgctgaatgacaaatggggaaggacattctttcttttttttttttttttttttttgagatggagtctcgctctgtcgcccaggctggagtgcctgggcgtgatctcggctcactgcaagctccgcctcccgggttcacgccattctcctgcctcagcctcccgagttgctgggactgcaggcacccgccaccacgcccggctaactttttgtatttttagtagagatggggtttcaccgtgttagccaggctggtctcgatctcctgaccttgagatccgcccacctcggcctcccaaagtgctgggattacaggcgtgagccaccgcactcggcggggaaggacattcaaagcaaagggagcagagtgtaccaagccacgtgaagtacagagttctcttctcttttgaggctttggggtcacctgcccagataattctaaacactaaattgtagccaggggcatctcctactctcactgccctcatgattgcctctggactgtgttcctacgagtgtcgtgctcgctggtgctctttcgtctggctgcccctaatcgcactgcaaacaactcccactgagttttctaaaatacagatctggccgggcgccgtggctcatgcctgtaatcccaacactttgggaggctgtggctggcagatcacctgaggtcagaagttcgagaccgggctgaccaatatggtgaagcccggtctctactaaaaatacaaaaattagccaggtgtgttagcgggcgcctgtaatcccagctactcaggaggatgaggcaggagaatcgcttgaacccaggaggcggaggttgcagtgagccgaaatcatgccactgcactccagcctgggtgacagagggagatcctgtctcaaaaatatatatatatgtatacaaatctgaatgtgttgctaccttgtgtaaaacttttaacagtcttcaggtgttcaaactcccagtttagctcagagcataaaattgggccacagtctctctctctcttttttttttttttagatggattcctgctctgttgcccaggctggagtgcagtggcgtgatctcggctcactgcaatctccgcctcccggattcaagcgattatccctgcctcagcctcccgagtagctgggactacaggcacccgccaccacgcccggctaatgtttgtattttcagtagagacggggtttcaccatattggccaggctcatttttttttaattaaaaattttttctggccaggcatagtggctcatgcttgtaatcccagcactttgggaggccaggaggtcaggagttcgagaccagcctggccaacatggcaaaacctcatctctactgaaaatacaaaaaattagccggatgtgctggcaggtgcctgaagtcccagctactcgggaggctgagacaggagaatcacttgaacccgggaggcagaggttgcagtgaggtgagatcgcgccattgcactccagcctgggcgacagagcgagactccatctcaaaaaacattgtttttctttatagccgagcgtggtggcacatccagctatagtcccagctactcaggaacctgaggcgggtggatcacttgagcccaggagttcgaggctgtattgagctatgatcatgccacagcacttcagcccaggtgacagagtgagaccacctctctaaaataataatcatcatttttttaagagatgaggtcagctggtcgctgtggctcacgccagtaatcccagcattttgggaggctgaggcaggtggatcacgaggtcaggagatcgacaccatcctggctaacacggtgaaacgcggtctctactaaaaatacaaaaaaaattagctgggcgtggtggcgggcgcctgtagtcccagctactcaggaggctgaggcaggagaatgggtgaacccaggaggcggagcttgcagtgagctgagatcgagccactgcactccagcctgggcgatagagtgagactccgtctcagaaaaaaaaaaaaagagatgaggtcttcttatggtgcccaggttggactctaattcctgggctccaggggtcctccttcctcagcctcctcagtagctgggattatagaggtaccactgtgctggtccacagtctcgtttaactgctcctatgtgaatgctgggtttctttttcctggaatgttcttctacccactttggagtctcaaattcaaatgtcttccctttctttttttctttttctttttttttttttttttttttttgtttttgagtcggagtctcgctctgtcgcccaggctggagtgcagtggcgcgatcctggctcactgcaagctccgcctcccgggttcacgccattctcctgcctcagcctcccgagtagctgggactacaggcgcccgccaccgcgcctggataatttttttttttttttttttagtagagacagggtttcaccgtgttagccaggatggtcttgatctcctgactttgtgatctgcctgccttggcctcccaaagtgctgggatgacaggcgtgagccaccgcacccggcccaaatgtcttccctttcttaaccatcccatcactccctctcttcatcaacagcagtatgtccaaattattcccatgacagctcttacccattttactgtaatttttcatttgcagttctgtgtatgtcctcaaaggccaagcagctagtctatgaggtgctccagaagcattcaggaccgctaacattgattcagagatgaccatctgccaggcacagtgctgactgcctttgtatggatcatctcatttaatcctctcaacaaccttatttgacaagtatccccatcttacaaaagagaaaactgaagctcagagagtttaagtaatgtgtccagagagacatggtcgcagagtgaggagctagggttcaaatcctggaaggagagacagctatggtcactctgctctaccctcaattttctgagataggaattgggaggaagggttggcagaaatctacatttttaaaaaagcagtaagctgtggattatggtctaaggaataacacagtcctgctggactcaccttacacacccttgggcctgctctggggaagtggggggtgggggactgggaggcacaagggcacctttcctgctgcaggtgactcatcgtgaccctggcttagtgacagcctggcaccgtgagccagcagaagcagccgtcccagtgtgaattctggctggtctgtgagctctggaccttacccagagactgcctgttccaaagcagtccctctgagatccctccctagggcatacggaaattacaagaaaaataattttttttttttgagacggagtttcattcctgttgcccaggctgccgtgcaatggcacgatctcagctcaccgcaacctccatctcccgggttcaagtgattctcctgccccagcctcccgagtagctggaattacaggcatgtatcaccatgcctggataattttttgtatttttagtagagacagggtttctccatgttggtcaggctgatctcaaactcccgacctcaggtgatccgcctccctcggcctctcaaggtgctgggattacaggtgtgagccaccgcacccggccaaaaaagaattttttaaagaagaatagaccatcctggctaacatggtgaaaccccgtctctactaaaaacacaaaaaattagccaggcgtggtggcgggcgcgtgcaatcccagctacttaagaggctgaggcaggagaattgctggaacccgggaggcagaggttgcagtgagccgagatcgagccactgcactccagcctgggtgagaagagtgaaactccatctctaaataaagaaataaaagagaactctggggcaccatgtgaggggaactccaaggagagtcttgggtagagacggagcgaggagcacaggcaggatgctgcgccttccaggaaaggtcagtaagatgtccccactggcaatgtgattctgggaccatcgagaatgggttatttgctttgctgcgtgcaaactcctctcatcgctgcaatcttttagggaagctgctcacacaaaggccttcttgcagaatcaaggagaaggtacccatttcctctgccactcttctctgcccccagccttcttccctttcctctcaggagactccacgttcctcgagggctttgccttgctgttccctctgccttgaccactcttgctccagatcctagccgtcacttcctctcctcgttcaggtccccgctctgatgtcatctcctctgtgaggccttgcctgactgcaaactacacaccaacactccctctccccttgtctgctttgcttattttcctagcacttatctctttctaatatgttaggtattttccttacgtattgtctattctttgctagagtgtaagctccatgagagcagggatttgggtctttttgttgttcctgctatatcccaagagcctcactgagatcctggcacattgcaagcattccttcaattcatactggttgaatgggccgggcgcggtggctcatgcctggaatcccagcactttgggaggccaaggcaggcggatcatgaggtcaggagttcgagaccagcctgtccaatatggtgaaactccgtctctactaaaaatacaaaaattagctgggcgtggtggcacgcacctgtagtcacagctactcaggaggctgaggcagaattgcttgaacctaggaggcagaggttgcagtgagccgagatcgcgccactgcactccagcctgggcgatgcagtgagactcgtctcaaaacacacaaacaaacaaacaaaaacctgttgcccaggctggagtacagtggttccatctcagctcactgccacctccacctcccgggttcaagcaattctcctgcctcaggaggccaggttggtctcaaactcctgacctcaaatgatccacccacctcggcctcccaaagcgccgggttgaatgaaggaaggatgaatggagaactggcggaagctcttgtctagagccagcattagcttttcccataattggcagatatttcctggaggtcactggacttccctcaggatgtgagctgagggcacaaaccagtcctggttacctctcaaaaggtcagagtaggctgggcacggtggctcacgcctgtcatcccaccactttggagtgaccactttgagatcgtgccattgcactccagcctgggcgacagactctgtcacaaaaaaacaaacaaacaaacaaaaaaaggcggacgtctgggtaatgtctgtgatgtcattctcgcgtgcattctggtttgctagagaaaggaatgtcgacacagttataaagcatgtaattgcacttaatacctatcttatctatcagcttcttggaggcatcgttactgctgataaagtggacgaataattgtggtttcatttttcctcgggaaaattaatcatggagagaggtgtcaaaatgtaggtgtgcgtacaggatcgtgtcaagcccaaaacaccacgttgcgtggtatctccttgtttgagaatctctgccccaggtttcaaatctaagctcctcaggcagctggcctgaccccgggccaaacctgttcttgcctctaagctccacatgcaccgttccctccacccacagcgcgccgccctcttggaaaaactcacagccatctgctgacgacgagctccgtggttgcagcttgaagcactttcttttttttttttgctctgtcgcccaggctggagggcagtggcataatctcggctcactgtaaccttcgcctccggggttcaagggattctcctgcctcagccttccgagtagctgggattacaggcacacgccaccctgcctggctaatttttgtatttttagtagagatggggtttcaccgtgttggccaggctggtcttgaactcctgacctcaggtgatccacctgcctcagcctcccaaagtgctgggactacaggcgtgagccaccgcgcccggcccactcattctctttcttgtggaggcgacactgatttcattttggcgagtcatctcctcccactcttggttctgtggtttccggtgtgggttccggtgtgcccctggtagctctgtctccaggggcaggcactcgatccaggcctgaccaatcagaatctattcctctccctggctacagtgattgggtcagggtggatgcctcattcaaggtgctgcactgagaatccgctctgagacttccacattttgggaaagaggcacttcctctttctgcctccaatgctgaactgacagaatgaaagcctggagctgtgggtggctgttgctgccaccccacctccaggtgagaatctgcttgggaaagaagccactgtagaggaaggttcagccaggcgatggttccagacacattcctgacagtgtgtgagcacctggaagtagccttactctgggactaaggtgctaatgcttataaatatcctttttttggcccaagccagtttggactgggtttgtcacttgcaacagaatttgaacgagaggtgtccgggcacggtggctcatgcctgtcaccccagcactttgggaggccgaggtgggaggcatcacccaaggtcaggagttcgagaccagcctggccaacacggtgaaacccaatctctactaaaaatacaaaaattagccaggcgtggtggcgcatgatgtagtcccagctactcaggaggttgaggcaggagaatcacttgaacctgggaggtggaggtcgcagtgagccaagatcacaccactacactccagcctgggtgacaagaacgagactgtctcgagaaaaacctgcaacacgaggcccttggttgccttccggggccctcttcgtttcctaatattcataaggagaccacattggcaaacacgtattgctttatttagtgtttctctggattgcagaagtgtcagcagtgggctgagacccccagaagggcatagaggcagctgggcagcccccaggcccttgagggtaggagcagggagaagcagcagaaggaggtgatgcccctgccgctcctcccaaggccagccccgtccccacgctcccatgccagggaggggtcaggggccagaaaaggccctacatccttgagtggggcccgagtgtgcgggcaagctgtctgtcatcccaaggcctggactctggcagaggcgcttttcccacctggtggctcccagggccgattgctggtcaaggagccagatatactcttaagacatgatgtgggttttatggggctccctggctctgggagtggcagtgaggcacgctgaggaagggctgccatcttggttttgtggcaacctgccgtatgaccgtgggcaagtgccttctcctgtttgggcatctgtcttctgctctgtaacatcaaggggctgggctggatgatctctcagcgtcttccaacctctatggtctaagacggccttccccactccagcactgcctcaaactgggatgatgaggacagtaaaagggcgttctttttttttttttttaagacggagtctcgctctgttgcccaggctggagtgcagtggtgtactcttggctcactgcaacctccacttcccgggttcaagtgattctcctgcctcagcctcccgagtagctgggattagaggcgtgcaccaccatgcccggctaattttgtatttttactagaggcggagtttctccatgtaggtcaggttggtctcgaaatcctgacctcaggttatctgcccgtctccgcctcccaaagtgctggggttacaggcgtgagccaccatgcccagcctaaaaggacattcttaaggcagaaagaagggggcaggcaagggtggtctcagcccccagatggaagtcagagtgggctgcaaaagatgcagatgggcaggcagggagacaggtaaacagacagaaagacaaggtgccaagggaatcaggaggagaggtgtcctggccagggaagagggcaccagagcccagcccacacaacctctcggctacattccttgccctgctggagtcagggaaaacacatccactgtgtccttgggtgggaaatggctttttttaaaaaatagtttcctataaagcatcaaaaaaacctcagagaaaacctcagcaaaagttcccttctctcaaatatttggcatcggcagtagggctggcatggctcgctctggccctggctttcctattgctgtggcccggcctggcccactcctggggtagctcctggcccctgctgctccctcaagagagggatgggcaggaggtgggagattgcaggtgggcttcggggtgtccctgggtccctgtctggaagttcgagtctttggtaactgggaaggggaggaggagaaaagcaaagcattgggcgttgggagggtccagtgggcgcctttatcaccgagaattcagccgtggggcgacctgtgggggcggagagagacggccaagtggtgaggggagcagacgggggccccggtactcagacttttcttttcgtccttgttttttcctttttatggagaatggggtctcgctatattgtccaggctggtcttggactcctgggctcaagctgtcctcccacctctgcttccctaagagttgggattacaggcgtgagccgccgcacccagccccagcgctcagattcatgggttcgatgcaggcaggagtggtgggggcctagtggtctccatcctggagactcagacctgactcccataggaatgcccaccgccctggccagcgtgagcctgtgagcctgtcctccctcctggcacccccaatcagcctatgtatcttccctgcattgccgtgctgcctttttttttttttttttttttttgagacagggtctcattttgtcacccaggctggagtgcagtggtgagatcttgggtctcattgcagcctcaacctcctgggctcaagcaatcctctcatctcaggcttctgagcaactgggactacaggcatacgccaccacaccaggctaacttttttgtatacaaattctgagatggaattttgctcttgttgcccagggtagagtgtaatggcgcaatctcggctcaccgcaacctccacctcccgggtttaagcgattctcctgcctcagcctcccaagtagctgggattacaggcatgcgccaccacactcggctaattttgtattttagtagagatggggtttctccagttggtcaggctggtttcgaactcccaacctcaggtgatccacttgccttcgcctcccaaagtgctgggattacaggcgtgagccactgtgcctggcctttttttttttttttgagatgacatctcactctgttccccaggcctggagtgcagtggcatgatatcagctcactgcaatctccacctcctgggttcaagcaattctcccgcctcagcccccactagtagctggtattacaggcgtgcaccaccacgcccggctaatttttgtgttattagtagagatggggtttcacgatgttggccaggctggtctcgaactcctgatctcgggtgatccacacacctcggcctcccaaagtgctgggattaaaggtgtgagccactgcacccagccttttgcatttttttagtagatgggttttgccatgttggccaggctggtttcaaactcctggcctctggtgatccacccgcctcagcctcccaaagtgctgggattataggcatgagccaccgtgctgccacctttacaactttctgcactgaggggctctctctggccctcatgggtgggccaagggatggaagaggtggtatgatggcctctggatgaaggcccatggtgaggtgcctgggctctgccaagcacagccaaggaaggcttggctatcacagccaggccataagcgggaaagcaggccccactcaccacagccaggtgcccgttcttggccttggtgatgagcagctccgagccgggtgtgaagtcaatggtgccatccctgccggggccccctgcaaacgtgatgctgggggaacggggtgggtgagggtttttccatggaggcagacccccaaccctaaggtggacccccaccctgtccctgggtgcccacacagccccctcgccacccccgccctgtccccgggggccgcccgcgcctcacctgccctggttgatgttgatgctgttcacgcggttggcactgagggctgtcttggtcagcgtctcaatcacgtggtcactctgcagcaccacatctccctggggggccaggcaggaggaggggtcaggccctgcccagaacttgaggaacccccgccccacctccccatccacctcctgacccccaaatccacccccatccaccctcccacctccccatccacctcctgaccccccaatctacccccatccaccctcccacctccccatccacccccacaccccctattcccccatccaccccacctccccatctacctcccccatcccccaccactcctccccatccatgaaaaggcaccttttgcttattgtccgcacgctgtacatgaagcacaaaaagactgtcgctcaggctgctgacagagattcctgaggggagagggcaaaggtcagaggtcgagggtcagagcagggccctccccctgcagccctggaccctggctgaccggtcaggttggcgtaatcaatcctctgcttgactttggcgtcctccacgatgacgacggcgttgggcgtgagcagcagctgccgggagcgaggcttgtagcccttgcggtcgtatttcacaacaggcaccgcatactggggacagaggccaggctgaaggggctggggagaggctcccaaggctccgcccctgccctgacctgccttcagctctcaggcagtagcaccgtgctgctggactcagggctgcaggcaggctcttacctgaatgggctcagagcccaaggcctgcagcactcgggggctgatctcatctgtacctgcaactcagatggcggggagggaagtcagtggaggcaatgggggaccaggatggtgacgaaaggtctgagtgctggaaagtcaggggctcaccaagccgagtgctgatgaagagcctgggtacactctgagggtaattatccttcttgcccttgaagatctcactagccacggccttctgctgcagctgaggagacaaggggggtgaggagagtgtcatggtggggagcaccatcttgggggggcagagccagccttaggacctgagacagcctccctcacccgcttgctggtccctctctggctcagcaccaggaggctgagccctgccccccacacgcccatcaaccctccacttcctgaccctctgccgccaccaagcactccccagcggggtcatgaaggcactgcggggttttgaaactggccttggtaatgcttccccaccccatcaggccctggtggccctgagactcagctccagcttggggtcttgtaagcagcagatcactaatactcaaggttactgggtgggccctttagcatcatccaatactgagttggcaaaaacacggcacatcaaccaatgcctgtaatcagggcagatatcaccaatcgacccgagtgaagacgcagacttttcaacacagggttctgagcagtctctaccaatcaagggcagttggcccacgatatgaaccctactggccaccccagctgtactccagtgtccacttcctacacgaggcccagcagggcctggcatccaactgaggtcaccggtagaccggggtaaatacggtagactagggtaaatagagcagaccggggtaaatagagcagaccggggtaaacagagtagaccggggtaaatacggtaggcggggtaaatatggtaggcagggcaaaatacggtagaccggggtcaatactatagacggggtaaatacagtagattgcggtaaatagagtagactggggtaaatacggtaggtggggtaaatacagtagaccgagataaatacggtaggcggggtaaatacggtagactggggtaaatagagtagaccagggtaaatacggtagatcggggtaaatacggtagaacgcggtaaatacggtagaccggggtaaatgcccctccaggcggacaccctttgagcaatgcttgcgactccctgactccacttcctcatcctcacccagccccgctctccgtacctgctgcttccactcagggctgatactccggcagtatttccacaccatgttctttatgcacaactcccgcagaagctctgaggcctaaggggaggagtgaggtcagaggtcctggacaccctgggcccttccctctgaagacatcgaacatatgctactgcatcctttggataagtaacaccccctccatctggagacgcttccggtcaagagaccttactcggcagggcgcggtggctcacgcctggaatcccagcactttgggaggccaaggtgggtggatcacccgagctcaggagttcaagaccagcctggccaacagggtgaaaccccgtctctactaaaaataaaaaaattagccgggcgtagtggcgggcgcctgtagtcccagctactcaggaggctgaggcaggagaatcgcttgaacccgggaggcggaggttgcagtgaaccgagatcatgccactccctgggcgaaagtgtgagactccatctcaaaaaaaaaagagaccttacttttcactgctcagctctggtccgggccctccgtgagccctccctgaccaatcctttggcccgaagaaatcagacccttctgctgtgtactatgatggtccctaacttggcagggggtgcccacagacctcacgcagggcaggtgggggcgtgggccacgaggtgtccaggacattctggggcagctgccgcctcaggtttagcaaaaaagaggtgcgcacatggtccaggaagaaggcgttctcggggcagcggggggcgtggcgcaggacgaagcctcggatgagcctggggtggggggccagacagggttgggggtgaggggcctggcggtgaaccaccccccacgccctgctctgcagcccccacaaggcaccctggcgctcaccgccggatggtctgtgccgcccacttcctcttggctgccttcctccggcccagtgttccacgccaccacgactggatgcagatggctgtcgtggagaccacagatggctgaactctatcttcttaccatggtggccccccctggccccagaccccgcccctcctgaacacccatgggcccgcgaacctgatctcttcacccggaggaatttctgccgccagtgaaagcccctccaggcagcttggatctttgtggctgcggttgggaaagaaaggcaattggccagagcgcggggagccagctgggagcctggtgccgtgtgcgctccacgagtggcatgaatgggagagtggctgaaggaaccaacgagcaggaggagagtggtgaagaagaatgaatgtggggactgcccggaaaaggggggcggcgggtgggatggtgggcgtggggctggagctggtggggaggggctccaagtcggccattggactctctggagaaggactccctggagctgggcgtggggctggagctgatagggaggggtggactccctggagaaggagcccaagggagtgacttccctgcttcccagaagggaccccgtgcagcaggaagggtaggcctctctctcacccaggctctgccgccggacctccagggcatcctctgtggcaaacagggtcttggggaagcggatgaagatcttggtcctgggagagcagtagtgatcagcccggggttgccactcccattccccgcaggcacccggcacggacactacccacctgcccatcttgtactcttctggcttgtagcccaggtgtcggaccagcacagccaccccatcctgcggccgtcctgcccacgtgggccacgtctctgggcacagtgacttgtacctggggacaggaatgcacgcggctcccaccccagtcagcagcctgccctggggaccccaatcagctttctctgggcacctgctgggtgctcccactgactcgttcacagctagcaggaggctcactcggtcactgcccccattttaaagatgaagaaaccgttcttatctacctaaggccaagtaactagaaagtggcagagatgaaattcagtttgaccccccaggcccccgactcagaagaaccacaaagctgctccaccctttcggagccccttggaagctgccctacaaggcttgctgtctgcctctggtgcccggcacgtggacggaggcctcctgtacccctgaccgggtgctcctggagggcacggcctgggggagccgggtattctttccacccagcctgatgtcaggaccgcagcaccaagggcctccaccaagggcagcccagggcctccgcatccgcatttctaaaatggggccgagaacccttgtctgccctcatgggacctaggggctcctaccctcccgctccccttccctggcaccgagcaggacctgcccccacctttgcaggaaagcttcgtatttgcggcgataggcaaagccggctctgcgcacgcgcaggttttccaacagccccaggtacttcacctggtggcggatcagcacctcgtcaaagcggcctggggtagggggagcgccgtggtcagcgggctggcgctgacggcctgtctcctgcaggggaggcccggccccgaagtcccccgtgggaggggcctaccgggctgtttggcatcattgggtttgatgcagcggacgtaggcgggctccttagactgcaggatctccaccagctgcaggaggctcatcttgaactgggtggcgacctggcgagccaagaggcatgggaggttggccggagctgggctaaagctgctgaccccagcagcgagtaccccactcccctggctggtgacgcgcgcagcagcctctgattctgcctggtccttactcctcccaccacagcttcctcgcagcagaggagggggccagactccaccccttacccctctggctgggcgagagacctcagtctacgagcctcactccagcctaaaactcctgctcaggtctcccagcaacctcagtgctacacctccctttagtggcccttctttttctttctagaacttcagggctgcgttcctaaacagcatgtcccatgctacgcattcagctagtatctgggtatgctgctctgcgggacctggaaggatctcaggcctggcggaggagcacgctccttggcaaagactcacaatcccggtgttccgagagtagcaggtgtatgcctgtgggttctgagagccccacaaagggacaattcatccagtctgagggttagggggcaccaggtgacgtcttctggaaatgacgctctgctgagctttaaaggataaggaggaggggcgggtgaagtggctacagggaaggactgagggggagctgctaagtactccggcaagatccagtggctggacaagggagacaaggagagaaaagaacgagggggccggagccgggcgcggtggctcacgcctgtcatcccagcactttgggaggccgaggcgggcggatcacctgaggtcaggagtttaagactagcctggccaacatggtgaaaccccatctctacaaaaataaaaaaattagccgggcacgatggcgggtacctgtaatcccagctactcgtgagtgtgaagtgggagaatggcgtgagcccaggaggcagaggttgcagtgagccgagatcgcgccactgcactccagcctgggtgacagagcgagactccgtctcaaaaacaaaaacaaaaacaaaaaaggggatgacacccaggtttctggcctgggggactgggtcaaagaaggagaaagcctggaggggcagaccaagggcccgtttgttatagaccagtgggatctagggtgccctggggccacctaggggaagaggatgagatacacgagtctgtggcttgctggagaggcctgggcgggagggtgtgtaggcatcctcagcagggagacgctagggccgggaggatgtggtgcttcgggagagggtggggtggacggcagcagcgggcaggggcacagtgagccacaccctgggcagcatgtcgcctgcatgccctccctgccaggcagtctggcttccacctccctatggactcactgacctcactcttctggggctcccctgaccctctttttgccaagcccaacagccgtacctccgccttcagctcgctggagccctccctgcatctggcaccctggccatgcctgcctttcccccggtccttctccttgatgccatcgctttcctgctcacctcatggcctttttagactctctgtgtctggactgggccctcactataggttcatctgacattcccaagtcatctccaatgcttcctcctccagggagcctccccaacccctcaccccttccgccccgtcaggccgtttgctgttccctcttctaagtttgcaaagcaccctgtgcacatgttgctgcaggcacacccactcattgtggtacctcagtgcctggcagtgtctgctataaatgtctgctgagtgggtagacacatgacagcaaccgcacagaggcagctgtcaacatatgggcacccacagagacagacgtacacaaggattcccctacagacacagcccacactgaagacacacgactccactatagacacagcacacacacacaagtaggcaaacagggacaggcgtggtggctcacaccggtaatcctaacactttgggaggccgaggcaggtggatcacccgaggtcaggagtttgagaccagccaggccaacatggtgaaaccccatctctacttaaaatacaaaaaattagccgggcatggtggcaggcgcctgtaatcccagctactcaggagactgaggcaggagaatcgcttgaaccagggaggtggaggttgcagtgagcccagattgcgccactgcactccagcctgggcaacagagcgagaccctgtctcaaaaaaaaaaaaaaaaaaaaaaagtaggcaaagaggcacctaaggcagccccctacagacacctgcagatgtgcacgggctcacacgcgttcacacgcacgctgccagctcccaggctcacacaggccctcatgcacactcaggcgcatgcacccctgcgcccggtcccgccacctcctcaccgtctctggccgcttcttgtcactgagctcgctccggtcaaagcactggctcataatgggattctttgagctacacatggtctgtgtgggcagagccggggtcagggtggggcacagggacaggcaggacaggctcctggacacaggtgcagagctgtgggctatccccacccccaccccggcctccccacgtcctcctcacctccttaaggttccggaagagaaggtcattgtttttgtccagaaaccctgggaggggagaaccgacgtgaggtgagacagagcctccccgcaggcccctgtggggacacagccccaggatcctcaccggtcacgctgtaggtcacctcccccgcatagtgcagaaggcggaattcccctcggcccagagatttcctggtccgctggtcagccagcttgtgcctgggggtgacagggaggaagctgcagatggctgccggcctgagccaagccctctgcctgctgaaagggcctcaggagcaggaaccagctgcccaggtgcaccccaggccgggcacagtggctcacggctgtaatcccagcagttggggaggccgaggtgggtagatcacaaagtcagtacttcgagaccagcttggtcaatatggtgaaaccccatctctaccaaaaatacaaaaattagccaggcgtggtggtgggcgcctgtagtcccagctactcaggaggctgacaaaggagaatcgcttgaacctgggaggcagaggttgcagtgagccgagatggtgccactacactccaaaaaaaaaagagcaggtgcacccccagggctgggtcactgaggcaggccaggcagggccagtggcctccctgatcagagcggaccatggaggctcagagaggtagatggccttggccagggccacacagtgccaggaccgggacctgggcctcctgacggccagggtacgctgcagggagggaaactctcgttgcttcggccgctgcgggctctgctcagaaggggtggtgagctgcgcactacttttcagaatggaatctgctgccccaagagagcacttaagtcttaggcgtgtttataccctttcacccatttgcttttaagaactatttcaagcagctaaccagagacacggacaaagattgaaggcacggagatgtttgtggcagccttgtgattccagcagaaacctgggaggctggccaggggccccgaagggctgggtgagagaggggagtatctgtgggtcagaaccgctccaggaagtgttctgaggaaaatgttgtttgatgatacgggaaaatgtgcaggatatttaccctgagccttatacacaagttctcgactacgaaaaaaaatgcatagaaaaaggcaggagggaaatgcctcacacagttaacagccatggcctttgggcgacgggatcacaggtggcttttgcgcacattccaactttgctgtaataagcaatattatttttataatcaggaacaagtttttagtatttattatttaatgaatcaggcagcccctaaacccgaatagattcagagagactcctagaaacaagtcttttttttttttttgagacggagtctcactctgtcatccaggctggagtgcagtggcaccatctcagctcactgcaagctccgccccccaggttcaagcaattctcctagctcccaagtagctggaattataggtgcccactaccacgcctgactaatttttgtagttttaatagagatagggtttcaccatgttggccaggctggtcttgaattcctgacctcaggtgatctctgcccacctaggcctcccacagtgtcgggatgacaggcgtgagccaccacgcccatccagaaacaaattttcaatatattattatgcaaaaaatactcatggctttggcattcaacagccctggcactgaccccagctcggcaacccagatgagagctaattttggggaaatgacttcgcctcttggagtctcagtgagaaaacaccaagaacccctcaaggagcagctgcaggtgaagcgacgacatgcacagcatgcatcagaccgcgctggacagaggcgcttgttcctgtttctacctctccccacttcagaggattccttcaataaaaatcaatttccaaacaaggaagatgaaaaatcttagcaagtttcattctcaaacaagaagaaggaggaagccaggctactagtgtcttgttttttgtttttttttttggggttgaagtctcactctgtcgctcaggctggagggcagtggtgcgatctcggctcactgcaacctgcacctcccgggttcgagcgattctcccgcctcagcctcccgagtagctgggattataggcacctgccaccacacccagcgaatttttgcatttttagtagagactgggtttcaccatgttgcccaggctcgttttgaactcctaacctaaggtgatccacccgcctcagcctcccaaagtgctaggattacaggcgtgagccactgcacctggccttctttctcttttttaaaaaattcattatttatttttttccctttttttttttttttgagacggagtctcgctcttgtcacccaggctggagtgcagtgggttgatcctagctcactgcaacctcaaaactccagggctcaagtgatgctcttgccccagccttctgcatagatgggactccaggcgtgtcagcatgcctggctaagcttcttagtttctggacacatgtgaggggtccttaactcagcaccgtccctggtcacctccttgtggctggtgttttgtgatggcggagggactcctgcactccgcaggctctgctgcaagtgagcccttgcccccagcagccccgcagccccactcacgtcaggaagtgtggatggtgcttgacagtatcctccagcttctccaggaaggtcaggtctgtggcctccccggggcgcagacactcctcatcctggggggtgtggcacagggggaaggacgtatgggggacaggtcagagcgcacagaggattggggtcaccgtgctgggaggcacagacacaggggaggggcagatcacagggagtctccacagagagcttccaactggggcggcacctccctccatcctccattcacagctctgccctgtctctactcagccccaaactctggccctccgtggaccagcctggagagaacggagaagggggacatcctcccacccagcctccagcaccaggccttggaggcgcagaggactcaccaaaatcgagatgatgcccttaaacttctcctccaccagatcacagatgattttgttgttgaaatactggacgggctcccactgaggggcagaagggaaggaagggatcaccgtggggtcctggcaccctctcccaggggccccgatacccaggctccccgtggcccacggagagtgcccccaggctagcacacaccgcgatgccctctgcctcgtactcctcctgctccgacttgagcgtgagctcgatgaagagctgctgcagcttctcgttgcagtaattgatgcagaactgctcaaagctgtaaggaaggagaagagcccacagtggctcagtggggacacaggaccaggagaggggaaaagctggacgacgcccctgagcacaggaggtgagaaacacagagacagtccccggctggctggggagtcacagggcaggaatgagaggctggaggacagaagagagggagcaggacaggagaccgggaggagagacgggggaaagatggcaccgacctgttatgctgaaacacttcaaagccataaatatccaggagcccgagaaccgtggtgctccgccagctggggctctccacgtcctagggcagtcattcaaccgaaggcgtgggccccctgcgcgtgccagccccaccctgcagcaccccccgcctcgccgacggccctcccttctgccttgggagcagtgtggaccgagccctcaccttggaggccagcgacctgttgatcttcccgacgagccaggtaaaagtgcggctgtacacagccttggcgagggcgtctcgtgcgtacgcggcctgctccaggttcagcgggctcaggagctgtggacgcagcgtgagacaaggagatgaatgccacagagcctgtgcatcccacctgctcccaggctcaggcagaccaggaagccgccaccactctgcactcccagctccagcaagcctgcagtatggggaggggtgctggtagtgggacctcagggaggacaggtggccaccccagagggaaggtggtagagggacaggaggcctccttcccgaggtgggagtctggttctagccggactgttactctcttcctatgtgaccctggccagctcactgtgctgcttcttttttttgagacagagtctagctctgttgccgtgatctcggctcactgcaacctccacctcccgggttcaagcgattctcctgcctcagcctcccgagtagctgggattacaggcgcccgccaccatgcccggctaatttttgtattcttagtagatggggtttcaccatgttggccaagatggtctcgaactcctgacctcaggtgacctgcccacctcagcctccccaagtgctggggttacaggcgtgagccacggcgctcggctctcactctgcttctctgagcagccttccttccatccctccagcattgctgagggaaccaggcgaaggggagtgatgggagtaggggctgccttggaacagctgcccctccacacccgagggcaagggcccggcctcacctcctcccccttggcgatgatcttcctgtgtgtcagggcttctcgcagcgtcgagccttccacgctgaggagctgccaagggcaggcgaggacacggtgagggtgcacccccagcccccgcccccgccgtcctcccgtcgccctctgcccgccccactcaccctggtcagatacttgagctggttctcggtggtgacctgggcattgctctcctcgttggcagcaaagtggatgttgcccaaatgaaggacgctggccacgatgctcagcaggtcctgggggagcaggccgggggcaggagggggtgagaggggccagagagccccaagagggcaactagcagatggccatgcaggggtgggtggtgaagtgtcggagagaaggggctggaagtgggaatgggtgttaaaggtggaaggtgattctgcgggtgggatgggcacggtggctgacgcctgtaatcccagcactttgggaggctgaggcgggaggatcatctgaggtcaggagttcgagaccagcccagccaacatggcaaaaccccatcattattaaaaatacaaaaattagccaggtgtggtggcaggtgtctgtaatcccaactactcaggaggctgaggcatgagaatcactttaacctggaggcagaggttgcagtgaactgagatcgcaccactgcactccagcctgggcgaaagagcgagactccatctcaaaaaaaaaaaaaaaaaaaaaaaagggattactggcccacgcctgtaatcccagcactttgagaggctgaggcaggcggatcacctgaggtcgggagttcgagaccaggctggccaacatggtgaaactccgtctctactaaaactacaaaaaattagctgggcgtggtggcgggcgcctgtaatcccagctactcgggaggctgaggcaggagaattgcttgaacccaggaggcggaggttgcagtgagctgagattgcaccactgcactccagcctgggcaacaagaatgaaactccgtctcaaaaaataaaaaacaaaaaaaaaaggagattttgggggtgtgacaggaggaaagcgagggtcccggaagaggcctcacctccacttcatcctcggtgaaatcaatgactgtcagagccttcctgacgaccttccagtcactcttgtcgttgatggaggagactttggcacactggccctggaggaagggcacagctgggttgccagccctggcaccagatccctgggtggcacctgccctccctgccagccactcaccttcaccaggtacaggtagctctgggggttccgttccaagcccagcctgcgaagagtctcctcctcgcccccctccagcagctggtagaagatgtggaagttccgctccccatgattctggtgcaccactcgtgacttttccaggaggtaactgaggatgtggccacccacgggggcaccctgtgggcagggcagggcatgaggccgggtcacggggactgggaaaagagcccacctgcccctcttctcccctgcactcctgggctttggcagccagacctggatgccaattccagccctgccactagctgcgtcggctcaggcacgccacccacgctggactcagttacttcatctaggaaatggggagattcaactccaacgacctggctgctccacctggatgcctgacaggtatcgcaaattcaacaggcctgaagctcaacaccggaccttctccctcttcaaacaagctcctgttagtgtctgccctccttggtcagtggtgactacatccttctcgttgttcaagccaaggacttggcagtcctcctggaagcctgtgtttctccaaaccctacatccaatcaggcagctcatcctgctgccttaacctttaaaacatccagaatccaatcactgctcgccacttccactgcaccacactggtctgagccaatgtcacctgtcacctacatgatgacatcagccccctaaccgttttccctgcttagcctggttcccctcccatctattcgtctactcccaatctcccagtgaagcagctaaagtcatttttttattttttatttttggagacagggtcttgctttcacccaggctggagtgcagtagtgcaatcacagttcactgcaccctcgaactcccgggttcaagcaattctcctgcctcagcctcctgagtagctgggacaacaggcacacaccaccgtgcctggctaatttttgtattttcagtagaggcagggtttcaccatgttggccaggctggtcttgaactcccgacctcacgtgatccacctgccccaacctcccaaagtgctcagattacaggcatgagccacctcacccagcccgatgactccccttctactcagagttaaaaaaaaaaaaaaaaagttcttgcaacaacccaaaagggcctgcaccgtttggcctctctctgttcgcgggcccctgctctcttctctggccgctgtggcctccgtgctgtcctggaacacttccagcaccctcgtatctcaggcctttgtcctggctgttccgttcccgctgcctggacaggcacctgcacagcctgctcctatctccatcaagccattattttctattttttttagagacagggtctcactccgtagcccaagctggagtacagtggcatgatcatagcttagggtaaccttggactcctggcctcaagtgatcctcctgcctcagcctccagaggagctgggacaacagacatgtgccaccctacccagctgtcaagcctttattaaaatgccactttctcagtgaggcctaccctaatacgaccgcacctgccccccactccttactgcattttattttctgccacggcctcaatttccctgtttattgtttatcaccctggaaggcaggatttttgtttgctttgtttgactgctggaattgcagcacctggaatagtccctggtacccagtaggtgcttcacacgtgtagagcctactgaatgggaatcctcacgacacacacatccatggtaccttgaagtcaaactgcacatccatgtacttcccgaacctgctggagttatcgttccggagggtcttggcatttccaaaggcctaggagtggacaggggtatgagggacacctggcactctccccctgccctccccaccccgccttgtagctactgctgcccctcccctcccgcactgggcttctctccctgcccctcccctcccctcccgcactgggcttctctccctgccctcccctcccctcctgcactgggcttctctccctgcccctcccctcccctcccacactagccttctctccctgccctcccctcccacactgggcttctctccctgcccctcccctcccgcactggcactgggcttctctccctgcccctcacctccagcaccgggttgctctgtagcagccggtcccgcacggcacctccgcgctcgggggctgggcaggtctctgcatagaactgcagcagcctcttggtggcctcggtcttgcctgccccgctctccccagagatcatcacagcctggtcccgacgctccgtgcgcagtgctcggtacacagtgtccgccacggcaaacctggggcggaggctcgtcagggagtttggggaggggggccaagcagagccccacgagagtcccgctcccacatctgggtggagtcctcttgtgggagtcgaatacacccttgaggatggggactgggggtccctcacaggtgtgggccatgggagatccgtcatagctgagaatgggcgtcaccgccagcgggaggactgagaggctctcacaggtgggaggctggaggtcacttaggtggaggctggagtcactcacgggtagggctggggggggtctttgcaggtggggttcagaggtcactaagattggggggccactcccagttggggaataagtcatgggtgtgagtcggggtagggactgagtcccacccacatggagctgagttgcgacattcatctctggtcactggggggcaagagactgtgggattcctcacagatgtggcgcgggacgccaggatcatttcagagtaaggtaagggttgggcggggtcacctcagatggagacagaggggtcgctcccggaggggctggggtcactcacaggtgagggggcacttcatagaagctgacgccacggtaacgctccatatgctgccggctgtagatctgcaggtcccggtagggattgacagagaccaggacggggccaatgtaggtctgggatcgggggaagagggtccaaagtttatcccgggccaggtgcgatggctcatgcctgtaatcccagcactttgggaggccaaggtgggcggatcacctgaggtcgggagttcaagaccaacctgaccaacatggagaaatccgtctctactaaaaatacaaaattagccgggcgtggtggcgggtgcctgtaatcccagctactcgggaggctgaggcaggagaatcgcttgaacccggggggaggaggttacagtgagctgagatcgcgccactgcactccagcctgggcaacaagagtgaaactgtctcaaaaaaaaaaaaaaagtttatcccggtgacccttggtgtctctttcccctccgcttgcctgtgtctgtgaccccagcacccctgccatctccccacaagggcctcacgtagatgagattctcccgaaatcgccgccgcaggttctcgatgaaggcggcctcgctggtgaagttctccagcagcacgaaatcctgcacccccacccggtcacgggcggtgagcgcactctccatggtcacccgaaccccgtcactgcccagggcctgcagagaatgggccacagaagagggtcagagtcatcgggggcggggcaaggccacttccctgcgcctgtgggactgagagggaacgtaggggcttgtggactccgggctagacacgggacatgagcatgacgggtgcggggggcctgggtgctgagggcctgggtgtggtgggccgggtgcggaaagccgggtgtggagggcccgggtcccagtgtggcagcagagggatcaccgaggctgcgggcacagaacagagacaacatgaaccacttgggactcggacacagggcatggacgcaggcaggaccagagggcagaacccgggaggtgctggttttgggtggagaaagggggggtcacaagaaggaactccttgaaatagcagaaagactgctctgttgagcttggaccaatcccctcctctctctggttccttcctcctaaaggaggaggagttgagttagaccaggtgacctcaggtccctcagctctgagccacgtgtgacaggtgctttggaggacaaatggctcagggtcaattctgcaggcagggtggggccgtctctcccacccagacccacccccacctccaccggtagagcgtcgagcaccaagcaagaggttactcccagactacaccagaggggttcccccagagggcctcccaccccagctgggctcagccacccactccagaacgcgggggaggccctccctcgcatggctggggccactccctttcctccagctgctgggctccccaggcacctcctccactgagagtcctgagaagcctcaggggatgggggctttaccatggaaagcccagctgcctctgggtcctactggagggtggagggtggtgcaggctgagcaagaccctcgccccacaaccagggctgagatggatccctcttcaaacagggtctcagggctccaaaaaatggacacccagagtatccagggtcagagaagaacaaggtggtggtgattgggggtggatcccaaaggggccgccggtgtcctctgaccacgaaaggcccagatttctggccgggggcctgcccctcccaggcttgtcctcaccgccccgctccaatcccgcgccgaagcggctgccaaatccggccgcggtccccgccccctcgccctcgggtcaggggtctccgcgttctcaggcgtccccggcggctcctcatccggccccgggtccgagcgtcccgcgccgccctccccgcctcggcctcctccccctgcaacttcccgggacgtttttccacccggaattcctgggccgcgcccgcttcctggcgaggccgaggcgacgccgcgaggtggggagggacgcccgggaccccccgccctgccccgccgcccccaggctcaccgacgcccggtagcgcatcctgcccggccggcctggcgcccgctccgctgcccgcgctccgggtcccgggctcggcggcggtggcggcggcgtcagcgagggagggcccgccccccgcaccgcccccacccgggcccctgaagcgcggggcttccccggcctcccccgcctcccgcgcggccgggctggggtcccctccaggtggggttggtggaggtgggggtgtcggggcggggggtccgcgggccgggggcgggggcgggctccgcctgagtcaggttttccaggagggacgccgttggcaccagggtggagcccggaacccgcgcggccgccgcgtctacaccgacccggaactcacttccgggcctgggactacactccgcggcgggcctgggcgctgggcgggcaccgaggcctgcgggtcccagaggaagcgggattttcctcccccaacccccgaactcgagtcccgggaaagttaaaaatagaaccaatgtccaaatacggccggcgcgcccggcgggcggagcgttctccgtgcgggacgccgtccacccacacgcgccggggcctggtccgagcctcgaacccaggaagatcttggttttcctcgtcagcacggagctcgcgccccagggacagggacggccaacgggtgccctggccgagcgcgcggagtacccggcccctctggagggctcagttccccctctgggaaattcgcgtcccccccgcccacggcatttggggcccacagcctctccccacccgggacaccccactcgcctctgggcccggacctcctccctccctcctttttttttctgttttttttttgagacggggtcttgcgctggctcccaggttggagttcagtggcgcgatctcggctcactgcaacctctgcctcccgggttctagcgattttcctgtctcagcctcccgagtagctgggattacaggcgtgcgccaccacactcggctaatttttgtatttttagtagagacggggttttaccatgttggccaagctggtctggaactcctgacctcaggtgatccacccgcctcggcctcccaaagtgctgggattccaggcgtgagccatcgcgcccggcccatctccctccctgctttgaagggggcctccctagtccctccggatctccgggacgccccccacctccgaagcggcctcggcagaacctccctcgcttggctctgcgggcaccaccctccctcgcctggggcgaaccttggctcagatcccaccgcgggcaggggcggggacgtctagagtctgcaaaaggctgggctggttcttcctcgcggtgggactctgagcaagtcacttaacgtttcggcttctgttcttcatccctaacatgaggctaacacaggcctagaagggccgttgggtggcctgagatagagcgtgaaggcacctccagaccccctatagacctcgctgcccccacccgccgccttccctcggccggacgctcatttctcacttgcttgcgggcagaggcctactgagagccaggccgtgggccacgcttccgatccggtggggagagcctcaggcgcgtctgcaggcacctgcctcctccaccaacacaacggcgtacacagactcgccctggtggggttaggcagagcgggaacccaaagccccagcgccccacccccagctcgcggaccccgctccctggggagagggcgaggctgcggcaggtgcgggccggatccttgcggggaaggctcgtcactgcaacaacccggccggagcggcggccctggggacccccgagcgggggcaccagctggtgggggagtgggagcgggggagggggaatggcggcgtctcggacagaggcgggggagggcgggaggagacgcccgctgcggtgcccccaggtttaaaatctagagggagggccgggcgcggtggctcacgcctgtaatcccagcgctttcggaggccgaggcgggcggatcatcagagttcaggagttcgagaccagcctgaccagcatggcgaaaccccctctctgctagaaaatacaaaaattagctgagcgtggtggtgggcgcctgtgtaatcccagctgctcgggaggctgaggcacgagaatcgcttgaacccgggagacggaggttgcagtgagccgagattgtgccactgcactccagcctgggcgacagagcgaagctccgtctccaaacaaaacagaacaaggaaaatctagagggagcaaggaggcgacccagcctccagcccgcccaggggtggggaacgtcctagaagacggggtagagggtcaagagagcccctcccggaagctcagctctctccctgccccgcgaggcgtgggggactcgggccgggggcgtggcaggagccagcgggggcgcggccagaggacggggcggagcttcgcggccgcagtgtccgccccgcccctccacgtcacgcggttggaatgaggggaatccgcgcgcggaggggtcgggcccgcttcttccagttcccgggccgcgccgccgcattcccgggatgcccgctggcgcccccgcagccaccgcccggcggcggaaggagggggcgtctccgccgctcgcgggccccagggcggctccagcactggcaacccccggcctgcccctcctcactggacggaagcgcgagccccgggcggggagggaagcggggaacctgggtgggaaagacgccgcggctgaggctgcagcgccaggcgcctcctgcgttctccgcgctttcttgggttactcctttcagtgacgccagccaagccgtgaggtccgtatcatcactccaatgcagaagaacttgaggctgggcaggtgacttgtgcaaggtctcaggaggagtgggactggaacccgggcactggaacaccttactgcagggctgccctgagcctctttgtgcggttatcagggctaccagggctgtgaccttcagtgacaccgttcaggcccctgtcggtgtcgtgtgattctattatgtcacatgtgggctttaggagtgggccagggcctttggctctgggcctagaggttccctgcaggccatggcccctgagtgacataggagacttcttccccaaggctgcctctgggtcttctcccacctggggaggcatttactggaaccacaggggatggggtggcccagcagacctgggctatctagtgcccttcagctcctataggccaggtgcctacaagcctgacttctgcggacagcggaaagctcaaatgttcccccagcctaagggcacacagatcttgccatggggtaggggtgttgggggctgggaggaggtgtcatctgaggcacccgggactgctgctataaaccgatgtccactgagcccaaggcagcagaaaggcagccacagcttgtctcacgggtggcacagagcagggcttcaacttctgtttattaaacaaatcttagatctgggcctggctgcccaccaaggaccgttccagacctcagggaattgttgtgaagggaaatggggaggagatagtggcgacttagggtctctaccctgattgctcacagggccttggtcaaggactgtccattctagctacacaaccatggatctttggctgccagacacctctgcctggggggtccagcaaacgtgaacagaggcaaggtgcagtgagtggctcacacctgtaaccccagaactttgagaggccgaggtgggaggatcgcttgaggccaggagttcaagaccagcctgggccacatagtggtgagacccctgcctccactaaaatttttttaaaaagttagccaggcatggtgtgtgcctgtggtcccagctacttggaaggctaaggtgggaggattgcttgagcccaagaggttgaggctgcagtgagctgtgatggtgctactgcactccagcctgggtaccccagaagacccagtgtcaaacaaacaaagaaacaaagcaataaacccataacatgttaacataaatttgtatgggggaaaaaaaaaagtaaacggcccaggagcggtggctcatgcctgtaatcccagcactttgggaggccaaggcaggcaagatcacttgaggtcaggagttccagaccagcctggcccacatggtgaaaccctgtttcaactaaaaatacaaaaaattagcagggtgtggtggcacacgcttgtaatcccagctacttgggaggctgagacaggagaactgcttgaatcctggaggaagaggttgcagagagctgagatcatgccactgcactccagactgagtgacagagacactgtctcaaaaaaaaaaaaaaaaaaagagggcctttgacccctaacctgtactccctgtttaatgtccttgtagagagaagggtggcactgtttgagctggtcatcacagcctggcattaacaggcctgctctcctgcctccactcctcacaccaagtagtcacgacctgctaaaacctcacctccaggccgggcgcggtggctcaggcctgtaatcccagcactttggtaggcctaggcaggtggatcacaaggtcaggagattgagaccatcctggctaacacggtgaaaccccgtctctactaaaaaaaaaaaaaaattagctgggcgcggtggcacacacctgtaatcccagctactcaggaggctgaggcaggagaatagcttgaacccggcaggtggaggttgcagtgagcagaggtcgcaccactgcattccatcctgggcaacagagcgagactccatctcaaaacaaaacaaaacaacaacaaaaacaaacaaaaacctcacctccatcactgctccttacctgggccaagacagcagcctaactggcctccttgccttcctcctaccaatccatttcctctggggcaacacaaatcaaatcaacacctcatgttcatagagtgaaggtttaggacaccctccatatgccaggcccatgattcacactcactgctgcttaccaggaccctgcctatgaactcccgagacccccctgctgtccccagtttaccccactgctcctgcattccgatgtgccagatggcccgctccagtcccctctccccccacccctccccccaggagggggccttcgcaccgtcgccagccagtccaagcttcagtgcctgcacctgcggcttccccagcccggggcactctccctgcccacctcactgagactcggctcaggtgtcacctcctccagaaccccttcctgattctcccaaacacgcagcgcctccttatcgcaccccgcaggaatcagctgtttccttgtcagtccctcccaggagacggctcccactccctacacgcagcgaggcacacggtggggctcagtcaccccttcccggacccctggatgaatgaatgaatctcagagccaggcgtgtgcgcgggaggccggagcgtgaggactgagggccgcgtggccatcctccttctccggccaccccggagccccccgcccgtcacactcggggcgcgctgggccccaggggcggagaacgggaaggggcgggtttaggcggcttctccggaacccagaggcggagcagggctgcgggcggggcccgaagggcgcgcagggtcctgggtcctgcagcccaggccgctcttccccgcctcccgctccccgcaggtaaatctaagtctccaccaggctgcgccggcgcctccgggtcgtgggaccccccccccccgcacgggtccacgcggccgttcttcggccccagcgatccccggccgtgacccctgcctcgtgcacggcggctcccggcccggccgcccgctccccacacccgccccccgcggccgccgtccccgcgccccgagtacccaccggcgtggctcttccggcgcgggcggggccgggctgggcggcgtggcgggcttggggatccgcggcccgggcgcactctccccgcccagggcccgccgggggccgggccgcagcctgtcgtcatcccgggcagggccgcgcaccctccggccccgccccgccccgcctcagccccggccgcgtccgcgaagcctcggtgcgtgcggcccccgcctcggcccgttcccggggccacagcgaacacgcgcgcgcccctccggccgaagacccggctccccgccgcgctgctgggggcgtgggggcgcccgactttctccctcctccgggccctttgcatctccagccccttcctgcgggccgggccagggccgcgctcccccgtttctacccacccgtgacccttcacccacctcccacaccgtccttctgttctgagtcttgggcggtcccagccctgcggactggagaggagcggggcgttgactgagcctggagcttccatgccctggtccttcgacctcacagcagccggcacttgccttttgtgcccagtattcacggttctgcccactgaggttcgggaagccggggaagagtcaagcccagacctccacttccaaaaatcctgctgctagtggcccttgcatccttactcttccactcaccccgtcttgttcagtctgttctggccccgccaaggatcggaacccctccccgctgctcagctcttgcccgagggctcgcctgagaggggctgcccggccttggggagacgctcccaccctcctcccagcccagagcatcccagcttacaagcttgcagggcctgtggggatgaaccacgcggatgatctccccggtgggtaccagctccacttgcagcgccattccgccctgcggagagccagcggcctgggcaccgcggcctgtgagcaagagctgcctgcccactggcgggctccgaccactccgggaccaggaacctacggtctaacgccgggatggccacttggttctgcttcaactgcagccccaggggatgtggctggtccagctcctcaggacacggctggagccgtccaggtctgactgggaggcctcttggcccggatggttggagcaggaagaggaggggctggggatggaggaaatgcctgttgtcccaggtaaccagaggagccgatgcagccacccatgggggaccctgggctccaggtcaaaggctaggacgcctttccccttccccccatccccacggcagctctatggctgggcccctcctcctgcccactctctggtaccacctagagagcacggggcccactccccaaaccagacggcatgccctcccctaggccaagaggacccgttagtaggcactggctttcctgcacatcccctcaacggggctgccccccacagcaggtgagcccccaccatgagtttgagagaccagggctgctggggcctggtcatgcagggcccggacagggggctgtcccgctgtgaggaagctcttggcttaccctcctctgagcctcagagcttgtgaggttagttcctgggttccctgggtgtgggcaacctctagccctgttcatcccttgcgtttcaacagtacccccaggtgacccccacccctgatgttcctgcttttctatttttattgttgctaaatcacagctgacactttcctggcctgagactgagccctccagtctccagccattccttataggaagtaagaacagggaagtggataggggaaacagacctttccagagggagaggctggcataggaagggctgagtcccgtgggtgtgtgctggcaccgacagccccataggcaggggccttccccccggcacccttctctctccccacagcttcccccgccccggaaaagctagcaagccttccttccttcctccgggaagcacatctatccagagcaggctcatccccggcggccacacaatggcccttatcagccgtggagccaggcgtagacccagtgcacaccaggtctcacttatttcctgtttccacccagtgggtcggggtggacccagaacggccatatcctgactggggcccagaggacggagagcaccccccattcccctttccgcctctcaatcactgctgggctcacccctcccacacaggaggctgggtgtgtggcgacctcagttcaccacgggggaggtgagcatgtggggggacccctggggtcaagccccggggccgcattaatcagaacggggaggcgggtctagtgcgatacactttctgcaattgttctcccacagtaatcttgagaatagggacatcatctgtattttacagactactgagaccgctctgcgggtgggttcagaccccattcctgtttctggtcctgtgggaaaccacaggtgcctggaactttgaagagactgtaccacttctctgagccttggctttcccatctgcccaatgaagggtgccatgcagtaaccctcgtgatggctgtgcatgtgagaaggaacaggtgggcaagtgagggctttggaggtccctaggtatatgtgttgggggcagggataggttaccatgggggaaaactcagcaagaaggggctgaggagaagtggggcagaaagagaagatggtggcattctggactggttaacgcaggcagaaggctcaacaccagggtatgcagagcagcgggtcaggagggatgaacaagagctcatttgacttaacagagtacattaagcggccaccggcatagatggcatgctccacctggttagggccccagaggctcaccattctagaacctcatcctagccccagtcctggccacttctgcaaatctcagacacagaagtctagttgggatctacagggtccctgttcctggaatctacagctagtcccaggcccatcaccgtacccccaccccccaatcatcagtcacacgcaagtgtaaaagccacgctaataattacccctgcacaatgtaacagtcacaaaacagccagccatggcctgctggaagccaggggacaattcttcatacacaggcttgcgggggagagtatgcaacacagagcaactggagtaaccctcagtcccaggacacaggatggcaggacaagcactgagcaggctcccagaggtgtcttctcctgggaaaagggctgccgagtgaccatggcggaggcaagtgctggatgtggggacaggccatgtccccaaagcccctagagggtgttctctgaagaaccccagggccagatcctccaaaatgtcttgagctggttctcccttctgcctgcccccactctgaggtcccggggggtccagggggggcccgtcgtcaatggctcctgacaagggtggcacagacgcacctcacctgccaaggaccaccctggaaaagtctgtggccacagctccttgaccacttgtcaccccttcctcagatggcagggtggaggcatgggactcaagctaccaacggaagcgaacctggatccttcccagttctctctgtcaggatctggaacttccatgcagtcagactccatgccgtgagtagggaggaaggttgtgctggccgaaggaccctcatcaacctgctcataaccatggcgtaagagcctggctagaggggcccctccattctgcccactgagtcagactgcttttgctgaaagcagaaatcccagaccctctgctcactcctcacggggacaagctatgagatgccaagactcctggaatccagcactgcttgcaccagtctatgtagcctgtacaaatgtgagcatctcccctcccagacagcctgaggcccaggacggcacgacaagaatgcaggcctgtgccaaatggggcatgtgcctggcaggactacttgggcaagactagaagagggggtaggaatccagaaatgagacgcagaactgtccccaggtcttcactgttgacacactagctggtttcactcacatctcagcaacaaaaacctgtatttaagcggctaattccagagatgagtagtggagagagcaaatgagcctggttagagctcactctgggaggagtatgtggacgacacttggctgtctcttcagggggccaggctgggcccccagcactcccggcagtggaaaggcagagctggctgccagctctggcctccgcctgggattcactcccatcctggctcagatctgtggctgtgcttcacccagtgggtcctccctcaaggagccaggcgggatctgcagggataaagcaggtggtggaaatggagagcgggtcttcctccgtgctttccatcacccccgttcctgcactgcagcggcccctcatgtaccggctggctcccaggcctgggcctcagggagccagtgatgagctcaagccctcacccttccccttccctcaccagcactgcttacctggaagggtctgcttatccccaccacagaacgcagactgttgctgtagtaacagaggagaaactcatcttcagtggtagggatattgctgatgtcgatgtaaacctggagggggatggacaggactggggtcagctccagggctctgggctccacccagctctgagtgacaagttattcagcactctgttccttccacaagacaggagtgctgaggcaggcctgcctgctggtgatgtacctggtgctggtgacgtacctggttcaggttgtcgctgcaggagaccttgctgtccccgacccaggcataggacacgtagtcattaacgtcccgcagccccacctgtgagggggagtcaggccatcagtggtcagggaggacatgggacctaaggcaagtcctaaggaagagatggtctccctgctgggcctggctaccgtactgtgtgcctccccgccgcccttcactgccagcctttagctacagaagaaccgctggggtggatgagggtgagttcgtcagcatctgcccagctcccaggagccctcgggaaggatgaaccaggggctgtcgctgatggacttcctgccttgccaccacatcaccttgtacagtccaatccagtcccacgggctgctggggaagtccgaggttgaagagtagctgaccatcatgtcattttccacggtccacaggtcctcgggcatcaggacgatcagcggagcagacaccaatggcttcagctagacacgggggtgggaagggggctgaatctcgcagcatcattccctcctctgaggccaagtgttcctcactgtgcccttccaacatagtggggaaggtggggcacccagagggggtgggcatggaactccactgggctgctccaacggaccttggctggccatcaggaaagagggccgaacaccagtcggcgggtggctggccctgtcggaatcccatggggcccagcgctggggggtaggaatggcggagagcagaggcacggctgagaggcttaaggaggcggccaggcagctgctctcaggcctcccgccttatctgacccaaagccccacatggggggatgctctggtgagaacagctgtgaacgtgcaagaacacaacgcagataccagcgggggccaggcacggtggctcacacccataatcccaacagtttgggaggatcacttgagcccaggagttcgagactagcctgggcaacatagtgaaaccctgtgtctacaaaaaatacataacagccaggcgtggtggcgtgcacctgtagtcccgctactagggaggctgaggtggaaggatcaatcacttgagcccaggaggtggaggcttcagtgagctatgataccgccactgcactccagcctgggcggcagaacgagaccctaacacacacacacacacgccagtaaacctgtatgaaaacgtgaaggctgaggggcagcagcctgaaggaggccaacaccaccttggtcattcagatagcaagatacaaggacgcagggatggagggagcgcccgttgcaacttgatccagatagatttaggacaaataaaagaagtcctacttctcacattgggtaataagcctaatggaactcattagccccaagggagaatacccaaaggaaatggaaaccttttcacaaagggtttgaacacggttttgacagacagagccatcaacggctcctaagaggagctgggatatccgacctggcaggaaaggcaatcatggcctccacaggtctcccctgggggactggctgacattcgaatccagggatggagggcttggggatgtggccagcatagctattcctctggcaagtatcaggcagcccagaagttcacctccaagtcgaacgtgccggagacaggcttgtggtcgctgatgccgtacgtcatgtggctgctgtagcccctcagagacaaggagaagtgtgacgccggcggtatgggagtgtcggggccagcacagggctgccgcttcagcctccacaggatgcgatcggtccatgcaggcttgcgttttttctcactgcaggggcagggggcataaagaggaagaatggggaaagaagaaagggttggctaagagcagaaatgagcccacatgagcttgctggagcccctaactccagcaactactggcagccacagacccccggggccagagccggagggagcaaggcagcaggcaggaaggtgcctaacagaatccaaagtatgccagcacttgtcagacttagccaggaccctctgtatgtctagctcatgtttttatggatcaaattgtgactcagaaacattccatttcaaagctttgcttctttcttgagcaaaagcagcagtggatcaaagcagctgaggtttgagattctgaggctggacacacctgagcttgtatttggctgccctgcatactagaagtatgcctcaggaaagggaagggaagcatttaggaaatgcttaccagaggatgcctgtgatcagtactgttaccacacctttttttaaatttaattttatttttttaaagagacagggtcttgctctgtcatgcaggctggagtgcagtggtgacatcacagcttactgtagcctcaaactactgggctcaggcgatcccacctcagcctcctgagtggctgggacggtaagtgcgtggcactatgcctggctaatttttaaacatttttttgtaaagacagtatgtttcccagcctagttttgaactgctggcctcaaaggatcttcccatctcagcttcccaaagtgttgggattagaaggcatggaccactgtgcctgggtgtatcatgctctctttacaggtggagaaactgagacttagcttagaggggaagcacctttcccaaagtcacaaggtactaagtggtggagccaggattcagggccagccagcatgaccacagagcatgtgctcttaaccaccaaactaaactaacctctctcaggcctcaacttcctcgcctgccagtggagggaataacagtagttaccatgaagggttgctaggatgagtcaatgagataaagtacataaaatgtttagcacagtgcttggtgcaaaacgagctcgccatgcacactggcctttatgatttcctctcaagagtcgactgagaggccgcgcgcggtgctcacgcctgtaatccaagcactttgggaggccagggtgggtggatcatgaggtcaggagatcgagaccatcctgactctctactaaaagtacaaacattagccaggcatggtggcaggtgcctgtaatcccagctactcgggaggctgaggcaagataattgcttgaagctggcaggcggaggttgcagtgagctgagatcataccacggcactctagcctgggcgacagagcaagactctatctccaaaaaaaaaggagtcgactgagagacctcccacctgttcttcacttgccagtttccctgaggggtttggaaaaggtaatacgctccggagacaaaatgcattcctcctctaggtaactgaagttgaccaaagacgagtctctgacccataacccagccttccgaagcaactactgtggcagtttctaaggccaccttgtccttgaggccctgccctcctggagaccagcagctctgactcctggaggtggggtgtgtgtgtggcgggggagcaggacagctgcggtttctgggttccacccccttcatggacaatctcctttcttgaatcaacccagagtaataaagcctaattggatcaatcaatcaatcaatctatagacagggtctcacacactctatctcatctattgatcgatcgacaggtctcactgtgttgaatcctatctacctacctattgattgatcaatccatcgacagggtcttgctgtgttgcccaggctgagtgcggtggcacaatcctaactcactgcagcttcaaatgcctgggcttcaagcaaccccccacctccgcctcctgaccagctgggaccacaggcatgtgccagggcacccggctattttagaacctttaaggcatcttcactgcctccagaataaagttaaagtccccaagtagggctttcaaggggctcaggagtctgaccaccccatccttcatctcacaccacttccccagacccactccaccttggtgactctctcaagcctctggacctttgcttttgcagtatttgctgcctggaacacctttcttcaccagggagaggcctttgccgaaaccatcccagacattagctttttgcttccaaagtttttttttttttttgagacggagtctcgctctgttgcccaggctggagtgcactggcgcaatctcggctcactgcaagctccgcctcccaggttcatgcaattctcctgcctcagcctccagaatagctgggattacaggcgcctgccaccatgcctggctaacttttttgtatttttagtagagacggggtttcaccgcattagccaggatggtcttgatctcctgacctcgtgatctgctcgccttggcctcccaaagtgctggattacaggcgtgagccaccgcgcccggccactgaaacattttataccagtattatacgattacactacattgcaattttctgtttcccactcagcatgtcacttaggtgtaagccctgaaggcaaggacttagctgttggagtgtcctgtgtatcctcagcattagcacagatcctggcacacaggtactcaataaccaggtacacttactaaaaacccaagctgaagctcgtccctcaaaaatgtccgtctaatcttaatgtttacagctccatatactcgcagttggaaacactatttttgtctccttctttattcaactgcttttttttttttttttttttaagacggagtctcgctatcgcccaggctggagtgcagtggcgcaatctcagctcactgcaacctctgcctcccgggttcaagcgattctcctgcctcagcctcccaagtagctgggattataggcgttgagccaccatgcccagctaatttttgtatttttagtagagactgggtttcaccatgctggccaggctggtcttgaactcctgaccttgtgatccgcccgcctcggcctcccaaagtgctgggattataggcgtgagccaccgtgcctggcctattcaactgctattttaaataaatgttcccaatgtactggtgtcccttcaacagtaaaagagtaagtattctagcaactgaggagaatggcgttacagtggtgagctcagacttttgaatcagagaccagttgggggaagggtccgtcctgttaattgagagctgtatgcccctgggcaagtgacttcatttctctaagcctcagtttcttcagctgttaagacggggtgataacagtacttacttcaaagagcagtaatgaaattaaagggcgtcaagggggtggtcacgaagcggtaactttgactaaccctggtctgcctgttggctccttgggtcatttccaatctttcactcttctaaggagtgttcagagggcactggaatgtggtattcccatcccagagaccacagacactgcgtccctgaatctgccttggacagcaggtgcctagcaatgcttacaacttggtaatggggctgggcacggtggctcacgcctgtaatcccagcactgtgggaggctgaggcgggcggatcacaaggtcaggagttcaagaccagcctggccaacatggtgaaaccccgtctctactaaaaacacacacacacacacacacacacaaatttgccaggcgtggtggcatgtgcctgtaaccccagctactcaggaggctgaggcaggagaatcgcttgaacctgggaagcggaggtttcagtgagccaagattgcattgttgcattccagcctgggcaacagagcaagactccatctcaaaaaaaaaaaagaaaaaaacaaacaaacatagggccaggcacggtggctcacgcctgtaatcccagcactttgggaggccaaggcgggcagatcatgaggtcaggacatggagaccatcctggctaacatggtgaaaccccgtctctactaaaaatacaaaaaattagccaggcgtggtgacgggcgcctgtagtcccagctactcaggaggctgaggcaagagaatggcgtgaacccgggagacagagcttgtagtgagtggagatcgcgccactgcactccagcctgggcgacagagcgagactccgtctcaaacaaacaaacaaacaaacttggtaatgaaccacacaaatgcacgttctctctttcaaagcattctccctccctaacttccctgtgatggtttggagcccatatatgctgtcatgtaagggtcttccccaagccctgaccacagcctgtctctccttcctcctcaggactctcagcccacccccaccccccttttttccttttccttgccacggccaggctgatcactgggcataccaagatttacttagcccttcttatgtgccccgcaactggggatatgagaaataggatggacaaagtccttgaggagcctgtttagcaaaatccaagaaacaagcaaagtgagcgtgtacaaattaaccaagttctctccactccaccttgtttttctttagagacagggtcttgctgtcatgcaggctggagtgcagtggtgtcctcctagctcactgcagcctccttgaactccgaggctcaaatgatcctcctgcctcagcctcctgaggagctgggacttcaggggtacacaccatgcccagctgttttttttttctttttaagacagggtctcactgttgcccaggctggagtgcagtggtgtgatcacagcccactacagcctcaacctcctggactcaagcaaggctcccaccccagtctcctgagtagctgggactacgggtatgtgccaccatgccaacttttgtatttttttgtagagatggggtttcaccatgttgcccaggctgaacctgagctcctgggttcaagtgatcatcctgtctctgcctcccaaattgctgggtttagaggtgtgacccatcacgcctggccttttttttttttttttgagacgaagtctcgctctgtcactcaggctggagtgcagtggcgtgatctcggctcactgcaacctccgcctcctgggttcacgccattctcctgcctcagcctcccgagtagctgggactacaggtgcccgccaccatgcccggctaatttttttttatttttagtagagacggggtttcaccgtgttcaccaggatggtctcgatctcctgacctcgtgatccacccgcctggcctcccaaagtgctgggatttcaggcgtgagccaccgcacccggccacaccaggccttttaaaaaaattttgcagggggagggttctcactctgatggtgaaacctcatctctactaaaaatacaaaaaattagccaggcatggtggcgggtgcctgtaatcctagctattcaggaggctgaggcaggcgagaatcacttgagcccaggaggcggacgttgcagtgagccaagatcatgccattgcactccagcctgggtgacaagaagaaaactctgtctcgaaaaaaataaaacactttgtctgggctcacagtggcaactataacaaaactccagtgtaaccccggactttagcaggattcccgccctgccctcagcccttttgccctccctataagggagctggcctcgtttctcattacatcttggctcagggacaccgtagtggctggcccagcacactaacgctcacagtcacttcatcaaaccggccccctccaggttcctctcgtcagtgtgctgactgattggaaagcccgcctttctgctttctgcgaaactctgtgcctccttcaagatactgtccttgacaggaagtctgacaggcctctcctagctttagctgttcacctccttaacatttgctccaaccttctgcacggagttctggaaaccttctattgactaactcccaggcttggtaacatatgccaggtactgtgctactcccagggatggtcctaaatcagatcgtctctgctctctgggcaatcacagtacagtaagaaaggtacgctgtgtctcaaaagcaacactgaaagcatggcatgcgcaaggctgggggtggcacaaggcaggagaggaactctcagtgagatgaggaggggccgggaaggcgtcctaggagaagtgatgtctcaactgggtttccaaggataaaataacagtgtcattagacaggaatatctgttccccaggtgggctcaggccctgctcactgcaaaactcccagctgcccctggatcctggccccagccaggagtatttcagttaccatgtcccctgttcccgcccagacagtcttgcatttcctgggctccagccaaagggaagcagtaccgaaggctcatgagtctacagacacagatatgagttccaatcctcgtgcgatgaagaagcctgttactccttacttatatattctttgagactcagttgctttccttgtaaacaggcaataataacactgtttacctaacgaggacatggtaggaactgatacaggcaaagccttggcgcacacctgcacgccaatcacaatgagctgttatttggaaataggtgcgtgcctcctccttagcgggagtctgccttcctcaccgtgccatcctttttcctcttgctggcaaggatgaccatgaatcctgaggtacgatgggcttgaggaaagtactgtgggctacagactcagagatcagtctcagccccagctctgccactcactggctgagctacctggggaagcccttgaacttctccaaagctctctaccctttctgaccctgccaactccagcccagatccagcttttgcaacaaacttcagtctcctggaggtctctctgccatagggctgggagaaggggacgcctggccgtagggcctgccagcagctctcttcctgctggtaagtttttaaagaggatttttttttttggagacagggttgcccagctggagtgcagtgagtcaatctcagctcactgcagcctttaactcctgggctcaagtgatcctcctgcctcagctttcctgagtagctgggactacaggcacatgccactacacccagctaatttttaaattttcgtagagacggggtctaactatgttgcccaggcaggtcttgaactcctggcttcaagcaccccctccccacccaaggccctaccctgtccttacagctcccaccaggactcttgtttccaatggatggctgcagagactggcagtctccctgcagctgttgatctgggccggccatcctgctgcagcctggcctcttacctcctttcctgcctgctctgttgcccagggcgggtcccttccccagcgtccactgcctcctcttctgtggacggccctgctcacgaccctaccctgtcttgctccacactgctgaatcggctcactctttccccctttccttgacaaggatattttggctttgctgtaacacttccagaaccaagcttgagttctacctcttgtcttggtctggctgtggagatatttcttccctggctaaatcccaaagccctgggctgccctgccggtacctcccgcctccctcacagagacactccagctaggaggaatgaacaagctgctcccgctggaacaaagaccctcatgacatgtaaggggctcttcttttcttcaaagagattaggttccttgccccaaaatgagtcagggacatgttgccagtggttctttctcaggttttggtggttatttggccccttctcagcttcttagaaaggtttttagtaaatctatcacgggaagacatgaatctatttattttattattatttttttgagacggagtctcgctctgtcacccaggctggagtgcagcggtgagatctcggctcacggcaacctctgcctcttgggttcaagcaattctcctgcctcagcttcctgagtagctgggattacaggtgcgcgctaccatgcccagctaatttttgaatttttagtagagatggggttttaccatgttggtcaggctggtctcaaactcctgaccttcagtgatccacctgcctcggccctcccaaagtgctgggattacaggtgtgagccaccgcgcccagccggcatgaatcgaaaagtcacaatagccgttctctcccatggttactgggtgacggcctccttcagtcctcagcctcatgaggtgtgtgctcttctcatccacaccttatagctgacaaaatcaaggcctaaacgctttggctaaaataagacagagccgtgcttctaactaccagactcatgatctctacactgatcctgatgaaactctctacctactacttcaccttctcacacaagacctgacccattcacaggctggggcaggcgtccttaataccagtaactggctgggccaagctttctgccccgtttggggaccagaaggtctggggtttcccgaagctgaagtgcagtccctcctaggtcaggaggcagctgctccaccctctcctctggttctatctgtaacacccccaccccctacacacctctcctgcccttgctggcactggctttcctcccactctctcgagatctgggacggctccccgagtcagcgcctcatgaagtggacaggaggtgccactctggagaggggatgactagaccaattcctgccccccctaacacttctattctgagacagttcccatgccagcagggtcagtgtaacctgacttcctagaccttctggccccccactccctcctcacctggtgtcatagtcgttggagttcctatcaaacttgtaggtgggcgggaagagtaggcggccctcctggaactcccggagcagcgggtcatgtttcttggcaatgctgagctgcagacaaagtcatagtccccgtctcccagtagtctcgacccagtggcccagtaccacactccattcaagggatcagcacatgccgtcacaaatggggcaagagtcaagcaatgccactccaattcctcactgccccagtgactactcagcagcccactcccaccagaaagcaggcgaatcctttcggaaacattaccaaggcccaggggaggcagctgtctgccgtttcccagtccttagactgcagggacccaacttggaattccatctctaggggagatcactagcagacatgtgtcagaggggaacctggggaagccagggttctccaaaggggcacctcaccctccaagagggaaacgaggctggggatgggaaagacgacagggacacgatgggctgacgcatgatggtacctggtgcaaagcccttctggttccctattcttcttctttttttttttttgagatggagttttgcttttgttgcccaggctggagtgcaatggcgctatctctgctcactgcaacctctgcctcccgggttcaagcgattcccctacctcagcctcccgagtagctgggattacaggcacgtgccaccacgcccggcgaatttttttttgtatttttagtagagatgaggtttctccaagttggtcaggctggtctcaaacccccgacctcaggtgatccacccacctcggcctcccagagtgctggaattacaggcataagccaccgtgcccggcccctattcttcttttttaaataattcatttcatgctttgtatctgactctctattctaaagcacatccagggtctgttaccctggcttttccatgtgaagatcaggcgtggctgcctcacccctggatgcgaagccctgctagacagcctcccccaccagacctgggcaaaagaaaacagcagcgagggcatctagcaacactctgcacagctcacatggcccccaccgtgggctcagatcaccccctgggaccctcccctcactggatacctggtccttctcccacaggccaccgtagcaccgatttttaatggattcccgaacaaagtgcaacccaaagtcctcgatccgaaagttcatgtctccaaaccagataatgaggcttcagaaaaaaaggagggcagcctgaggatttgtgatgaagtcggggaagggagatcaccaggtggctcagcctgctcaacccaagggctgctggggcacagaaaacctgaggggcaagtgagacgccagggcacgcgtgggtcctctggaactgttctcatggctcctaaaccaccattcaaaccggagagacctaccaaagagcctgctctggcaaacacagagcaggctgtggcccttccttcctctccttaactggtcacgaggaaaggctgagaagccctcctggtgacctcaggagccacaaggtccttgacctgttcccaagtgttcagggtttctaagcaagacagacgggctggaggaaggggaccccaggcaggcaaagcaaggggagacagcagatgggcaccagggaagggtcagggagagggtgggagccagaacactgacgacactggctgggggatccgtgatggagcagaggatgctggcttgggttagcgtggggcagagggcggggaacagtctgcagacccaggctcactcgtggcggtcagctggggcagagggcggggaacagtctgcagacccaggctcactcgtgggggtcagcgtggggcagagggcggggaacggtctgcagacccaggctcactcgtggcggtcagcgtggggcagagggcggggaacggtctgcagacccaggctcactcgtgggggtcagcgtggggcagagggcggggaacagtctgcagacccaggctcactcgtggcggtcagcgtggggcagagggcggggaacagtctgcagacccaggctcactcgtgggggtcagcgtggggcagagggcggggagcggtctgcagacccaggctcactcgtgggggttagtgggggttagcgtggggcagagggcggggaacggtctgccagacccaggctcactcgtggtccaggatgtttgggatgtctcgcccctcacaattctgcatctccaggatccggtcaaagtgctccagccgctggtaattgttggaaatgtggggaggcaggtggcagttgatgatgctgacatagtagccataaagcttcaggcagatgttgactccacctttgttcccctggtagaacaggtcaacagaagagtgggaagctactcgggttggacacacccctctttccacatcctggacctgagggcagacagtctcacttcctgcagggtctcctagggacagtaactaagcttcccagggtgatctctccatgcacagagcccagctcgcctcgcctggcctcagggatagcaagcccactctgaggcaaaagaacaaacatgcattgggctggacagaggaccaagattcctttcacttcctttttcttttgcccagctccacagttcccagcccttcccagctcacgactcagacaatagctcagtccttacccagtacccaaacaggccagtgggggtggatttagtagacagaatctggatatagggcaaatgctgatacttggcaaagaccagtaagaggatcccctgcatacggacatgggagacctgcaggagagagagggcaaaggtcgctcattaaaccacacaggccaagtgcatcccttccaagctccgtgctagggactctagagagccctcagctacatgcagtgtcctgctccagggtctacgatatcccagtttgaatctcagagtttcaagcctttccattcttcttctcagctgccaaatgatacattctgggggctgaggttttcgattctgcgcctaggcgtgcgggtggcgggaagagaagataagctaaggatactggctttgaagttagatctgggttcaaaccctggctctgattcttagtatttgacattgaggcagtttctcagtgtattttctcattgataaagtaggaatccatctcatagatgctgtggggattatctgaaagctattattttttggtttcagcattcttttttttttgagacggagtctcgctctgtcgcccaggctggagtgcaatggcgtggtctcggctcactgcaacctccacctcctgggttcaggtgattctcctgtctcagcttcccaagtagctgggattacaggcgcccaccaccaggtcttgtatttttagtagagatggggtttcaccgtgttggccaggctggtcttgaactctcgacctcaggtgatctgcctgccttggcctctcaaagtgctgggattgtaggcgtgagccaccgcgcccggccaagcattcttaaaaggaaggaacataagaggtttccaggatactgggaaatgctcttctttatccccttcccttcctccctctctccttggaaatgttctttatccaccagctgcccccattcctccctttttacttagagacaggatttcgctctgtctaccaggctggagtgcagtggtgcaatcacggctcgctgcagccttgacatcctgggctcaggcaatcctcccacctcagcctcctgagtagctaggaccacaggtgtgcaccaacatgcccggctatttttgtttgttttgtagagacagggtcttgccatattgcccagggtggtcttgaactcctgggttcaagcaatctccctgcctctataatcccaaagtgctgggattacaggcatgagccactgtactcggcctgctctttatctagatgtggctgatggtaacatgggtatatgcaaaaacccatcaaagtgtacactgaatttctgcatgcttttctgtgtacattatagctcagtgaaaaaaaaataagaaaatgctccccccaaaccccataactatatactgcgtgcagctgggtgtccatgaaggcaacgcccatggaatgccagtgggtaaggacacatgtgcacaggctagggagaatagctaacatctgctcaagtgcctcctctctcatttactcctgccaagcctgtaaggaatcaccgtccctgttttgtagttgaggaactaagatttagggaggctaaggaaccagtagggctacctgtattgtaaaacaacatcaaagggctaggactgccaagatccctactatctgcagctgcaaaaggtggggtgggaatgggccgcagccagtagctctccctctcaggttcaggctgtctaccaccggcacccgaggagccgtttccggagaatgaagtgtggaggccaaggaggaaatccccgggtggggagcgtgtactggggccttccaggaattatgaaacttgatcctgcaggccacgagccctggcatagcggagtcgaagcagggggaacctcaaacccagcactgggtaagggaggcatcagaacttcaggtgggccagaggttgctacaggtgtgtcctcaagcctacttcctccccagtcttctctctcctacacccaagcacacgtgccaacagggatggaggacgggctggaccatgaggggctgactcccagggtcaggattgaagcaaggggactgataaagactcaggaaaagtttcaggcttaatccccacccacaaagcagctttaggccactgggttccaccacaaagacactggctcgctttgtgaaggagcagcagggaagtgggggcggggagggtggggtcggggcaggacagagttagactgggagaaagggtggggctgtgggaaaagcaggagagttctagggaaagttctagttggaggaaatgaagtaggaggagcgaagaaaggactagcaggaggtggctgggggccctggagcagtggaagggggtcagcccttctcagtctatagctggcaaatgcacggagctcacccatccaccctgattcttggctggggaaagaagggcattcattttgggtgccaggccctcagtctggcctcccaatctcagtaggccacatgggtagaaagggctgtgtctctgccacaagttgagctaatttccttggctcaattccatcctaccaatcctttgccagtcagccgagaagcaaggaggcctgcagtcttgggaagggagtggcgggtgagagagaagtggttgtgtcctctgtaaggatctagctccctatctacagaaggaggcctctgggtttgatgtggagggaaccaaggactcgggctggtgttttctatcctcagcaggagttctaaaccttagattctttcctccccattctgctccccctccaaaggacacacagctcttgcctcagtacccccaggcaaactaggctgacagaatccattctgaagaacaagagtcatccaggaaggggaaagagggaattctggtatttctaagcagctgtataccaggtgctgtgaatgggagtgtgtttcattcctcaggtgtgcagggcagaaccaaggtgaaggtgaagatctggcaacccagggccttcctgtggactctcctactgtctaaagacaccccagagtatactggtctctcagactaagaaagccgcccaaagtacccaccacacctgactcccctctcctaacctctggacccccagaatctgaagtgcacgtcccgtatgacctgaggataccctatgacaccagcaggctagccacgcctaagatctgtcagtcttagagttcaccagcatagcaataaggtattagtagttaagaacttgggttatgaagtttgagagatctggatccaaatcccagatagcgcatgtggcttctgagccatggttttctctgtaaaatatctctatttcaacagacttgttaagattttaaaataacatatatactataaagagctacttatgatgtgtaacaacaagtaagcacttgataaatgacagccgtatgattacactcagagacttcaggatgggcatttgagtagagactggtggctggggcagcggccagcactgaggtgatgacaagccctgctgcacctcccctcagaatcttcccaagctgaaacatatccaggtgttaacccaacccctggagactccagctccctcagaaaggcgaaggcaggcaggggccccggggtccaggtggaagggaggtttagccctttaaacaaatgggaaacagcatgaaaggctgagcaggagtaagaggaacacatcagacccaacaagcaggggtcagtggagatgtgaaaacacagttgtcaagtgccaatgaactggcaagttaccttgatgaagctcagaggggaaagcacatccatgaggaaactgctccacgagtcattaaaggcagcatcggaaaggaggcttatgatcccagagttcaattcctgcaaactgaccatgccagctcagaggcttggcccctggcctccaggctacttcccctgccacagatatttgataccatcttcacggactttcaaggcctgagttctgatggccatgaggtctccctcccctgcctgctgatctccagccccctttgccgttgctgacccgggaccagagacatgggactgtccctgaagcaggctgaaagctcccagccttcagactccagagcggaggagggcaggtcacagtgcttcccacagggaaacctgggactggtcagggatgggcgaaggagcctgcagatacctacccaataacatatatgtcaagattgaggttccggttgttcagctgaagcaggtcactgagatctagagggggcgctgccgaagccacgttccaagtcacgacgtgtatgctgcggaagggatgcagagggaagtcatggaggaaggaggataagatagtgcacggggtcggctgggcgcagaggctcacacgttgtcatcacagcactttgggcggccgaggtgggcggatcacctgaggtcgggagttcgagacaagcctggccaacatggtgaaaccccgtctctactaaaagtacaaaaattagcccagcatggtggcaggcgcctgtaatcccagctactctggaggctgaggcaggagaattgcttgaacccacgaggcagaggttgcagtgagccgacattgtgccactgcactccagcctgggtgacagagtgagactctgtctcaaaagaaaaaaaaaaaagatagtgcacggggtctaggcctgcttatgtcactgcaatctgccacactcatgatgggaaatgtgggtttctgtgctggtggagggaatggggatactgaaccatcagctgtccgtcctcacctttctctgctgaagcaagaaatccccaccccggactgggtcctccatgctggctcacagccacccacacccggcagcactggtgctgctgatatagcagagtcgccaaagggagcccaagaatttcaggtcaggctagcgaagggttagggggctgaactgccaggaatgtattaattccatcagctcctccagccacccacacccctctgtcatcatctatggctcagtcggcaacttctgatccctacttctcaccccaagtgttcctaagaccaccaggaagatcctagggattcagatttcaccttgtgataggcctcagcactacaagggcagaggaatttaaaaaataaaagagataacaccaccatattcccttcctctctcctccctagcagatccctggagcaagccaattttgccaagcacttcagcgagactttttttttttttttttttgagactgagtctcactctgttgcccaggctggagtggactgggatgatctcggctcatcgcagcctccgcctcccaggttccagcagttctcctgcctcaacctcccaagtagctgggattacaggtgtgtgccaccacatctggctaacttttgtatttttagtagagacggggtttcaccatgttggccaggctggtcctgaactcctgatctctcaggtgatccgcccgcctcagcctcccaaagtgctgggattacaggcctgagccaccgcgcccggccaaggagtttttaagtaacaggtttctcgacatctctcttaagagtctatgctctatgtctgcgtagtattccgtgaaaaataaagagtactctctggggaaaagtcatcagttggatattttccacctcagcttacaagtcttagggaagcaagaaaactagataaggggcctcaatgacactggatccagtcagaggctcaggaaagagagacctacagatgtctttagtggaacagtcagtcacagcagctcttcaagaagcctcagactgtgcggagcacagagcgggcaggagctacagaccctgcagagaccaggaacagcctagcatgagtcctaggcacacgatgaggagtacctgcagcagctggagatctggaatggcagagggtacagggggatgggagaaaagggcagttaatgccaaaacatctctcctccaacagaccccgtccttagaggtcgacgttctcaaaagcacttcaagaaattcttggccagtttaaagcaacttcctgtccctccctgttagcataaacaacactatacagaaaccaccttcccaggcactcggcctgagattttgagcttcatttgtttacgatctccccctgctgtccgacagaggcttaaggaacaaagaccttttactcagagacttcttttcccagactcactctaagaggatggagagcaaaagtccggatttcttgttcccactctcaaatccgacgattagcagcaaatccaagcatcgtgacttagactaagtgggcgattagcgttgttccccgtgaaagagcaggcaagagaccaggctaagtcacttccctaaaggatcttatctcaatctgatttcggattcccggggttcaccatgggatcaggcagacctcctgatgtatgtgctgatgaaaagtaggaaaaagatttctaaccgagagccgaagggtgacggcctcgttatgtctttaacctcaaacaaccccacacggctgtcctctccagaaagcaaccgggacacctgctgcgccccagtgggaacgagcttggcggcctcggcttagagggggcgcgaggctcgggcccaacacagcccacctgacacaggcgtgggagaaggcgagagcgcctctgaaccaaaggcagtcatggaggtctggtgccttgtccacccccagcccgcagcccaaggggcgccgatccccccgagcaggcctgcctctgccgccagggtgccctcacctgagcctcctgcctttcggcccgctcagcttccgcgagctcatggccgccgtcgtccccgcgcggtggtccggcaggttcgcgtctcccggccagcgggtcccggccagagcagccctgcgggcggccggtctcacgcgcctagctgtcgcggactgtttttcttccggactccgaccgtccgccccggcttccgtcagagacgcgccctccgcgcaccccgggatctgggtggtgcggttcgcagaaggaggcgggactctcccacgagcgcaaagctgcgagaggctgagcgaagacgggttcgcggacgtaagaggggcgtgtcgggcctgtcatcagcgcacgcgcaacactgccccagacgacgcgaggtgtgcggccgccactagacccggcccagcccgcgcccgccgtccgcagctcccagcgtgccccgcgccaggggccgtcttccggcggaagttgtctcttcgccgccgccgcagcctctgccccactcgtgagggatccgagggctccgtccttgtgctgtcttcgccccggctcccaggggtcaaacgagggtcgggggtggggacacgcagcctagccactgtcctgcctgggatccggtctcccccgccccccggctgcaggtaatctccccattcctgctactgcgggagcgcctccgttctccacgcccactttcaggcttctactccaaacttattggattacctattgcatatgggacgtttggggattcctggactcctacagaattagccgtcaataaatgaaacgtaggccggggcgcggtggctcaatgcctgtaatcccagcactttgggaggccgaggcgggcggctcacttgaggtcaggagtttaagaccagcctggccttaacatggtgaaaccccgtctctgctaaaaacacaaaagctagctgggcttgatagcgcgcgcctgttaatcccagctactcgggaggctgaggcaggagaatcgcctgaacccgggaggtggaggttgcagtgagccgagattgcgccactgcaccccagcctgcgcgacagagcgagacttcgtttcaaaaaaaaaaaataataataataattagccgagatggggtttcgccatgttggtcaggctggtctcgaactcctgacctcagctgatccacccgcctcggcctcccagagtgctgcgatttcaggtgtgagccaccgcgcccggcctaaaactactttaaataaatgttttgcttgtttggtagggtggataaagaggaagatgtgaagaggaggcagacaaaagcaaaaggacatcctgtcagtaggaaacggccgaattacaattcagatgtgcaatgtttgcataagtaaactgacacgggactattatatgcagaaatccacgtgcaaaaattttcagacacacctttgtacctcttcctaatcctgccctggtaaaatggcggttatcagtgcaagtttgaggatacatacagctggaaaatggacatcaccaaactggactccagaaagttctgtctaggattttattagactgctttttttctcaatatacctgtattggaagattgagacaaaaaggcacaaactcacattaaataaacaaggtaatctaatcaattctacaaagtgtagtttgtaaaacaagtagcactaggaaccaaccaaagtaagtcagggagtcccagcagggactgtaaaagaacttgggaagctatacacatgcccacgatactgaccctgtcccggacctctctgcatgagaaggccagagcccagcacccctcctacagaggcactgctgcttctgttggggctgtgaccctggaattctgatggaagcagctggtctgaaggggcatggcacacactcaggtactacccctggagctgaacctttatcataagtccctctgagtgctagtcagtttggaggtgggtgaggaggaaagggggtacttaaaagaagccaacactgttgcccagcagcaacaccatccgtggggatggaacagaccagggacatcctcctttatgtttatgtgggctgcaattccagatccaggctgacctcagctcataatggatgcttttcaactggggcaacaggtggaggtgggaggagcccttgttagggctaaagtgatatgtgtgggtctcaagagccaaaggaaggagactaacagctgctgaccctcagaccacatagacaactgtctgcctagaatgtcagtttgtttctttcaagataacccgcatctggacttcccctagttgatgaatgaaggaacatctttaagcacaaatataatgaatagctaacacagagcttataggaaaacactgacatttttctccagtaggaatgcctcttctccaactttccaagtcagataaatgctaccagcagttgagatgctacccagatgcattactaaagacccctcaaggtgaggagacttacacagaggaaggtgtctgtaacaagacatctggttccaaagggacctcaatgaaggtcagcgctaaccatgctgggggtctgagtctgtccacccttgccccaggagggccacagggaagcatccatcaggatgtcacaggtgcaatcctgtgagacactcccttattgcacttagaaatgagtaaggcaaacaaactgacaaaaacaggatacattctcccacccacttcttgcttcccggacaaagatttggtctcccattagcagatgcacccaggctagtgtgggctgggatcacggcacacttaggccaacgtgcttcacaaggtttggggaatgtcaggtgacactacagctctctctcattctcccactaagaggcaaactcaggctctgtcaagttgcaggaagctatgaacactgggcagcgtctgttcccctggagcctggacttcctcaccagcctactttggtcgggttctgtactatgatcactacttgctttgggttttccagggcagaactcaacatgggggtaggacgagctaagttcttgatccccaaattcctttccggcaactggagacgagggaacatgttctgctggaaaaagctttttgcatgctcatattgtgcagcatgaaagatcaggactcttgcttcctaaccagcctcaaagacagaggacagggacctaagaaagcacagagaaaagaggattattgctgagtggcagcaccagccccaaagggaagaggaggagcagggacttacagagctcctcggggtcagacagttggtatctagggggtgactcaattctaggggccacactggacaattccctccaagtggagagttgactggggcgattttgtagactgcagagagattcagagcgggcaacaggagggccaagaagccacaggtgtttctaagagtagtaactagagattcagtgattgggacagggttactcgtatttgttaaattttcttaaatagagactggctgagccttgggtacctccatagtgctagagtgccctaacgatgggttactgggagcagaagtcagagctgcaaaaccacattgctattttgtggaagcggtgcggggcagggaaacattgtatctttagctcatccccgctccccacaggagcactcaaaattgcgaagatcttcccaggaagcaaaatacctcagtttaccccaaggttgagaacaaatgaacttaaatcatttaaatcaccacatcacaaaaggcagctatttgaaagactgaaaatgtcacttggaaataaaggttgggggaacacacagaaatggatcggaacacaatggagagagacggaggcgctgtaactacagcaacctacacgccacgtatctcggaggagcaggctcctgcacacgcgggctctgtgacaccagacggtctatttgttcacaatactgaagggcatctagaattagctacagtaaggaatcgaaagttgcctgaagaatgggcacagaacggctgcgtccgaaaatggcctgtcacttgggagggtggagctgctgggtcttcctgttgaccactgtcttgcaaaactagaagaaaaatgaaagtattaaggaagcaagaggagaaaacagaaacactgtaaatcgtcctgaatggataatttcaagaggaggagggaagccagtgggtgggtggggaagggagtgggggagagcactgaggcccagagcagtgactgagaagctggcatcacagcagtccgcctcattccaccctccagcctccccgaggctgctttgggaacatggggcagggagagtaagcagggcctgccgtcactcctggtgagaccctggccctccttgcccgtagggttagaggccagcttttatttgtaaaaataattttctctctgaggctaattgggagcagagccaggtttttcattcagtgattaagactgctttgagctgctggaatcccatgactcgggtggtgtacagggcactgggaaaccagcaccgagagttaacggaaggagggggcttggggaaaagtgacaacatgaaacaaggggcccccaatctggccctgtgacctgggcagaaacaccctcccagcatctgaaagatgccacctctgatgagggcagcttagtatgggatcgggggtataaagaaggaaatgaagcaccagacaacagtgggtgctaacaaaagctgtctggccagcaagttttccaagggggaagggcaggtaatggcagcttttgggagctggcgctggcgtgggaaggccagggagtgcccaacatgacagctgcaacttgagatggatcaagctggcagacaggaggagtgattcgcagcagatgaactccccttctatatccaccaccccctccctgtccattgtctctatctgggtggttctttggaaaatgtccctgaaatgtcccaagggccataatctcctagtggaagtggagagctatcgagcgtggcaaccatcattactagagggaaggaggaataggttttctgactccatagtgagctgctgaggccttgaaacccaaactgattttagcgtctgtgacacgcacagtgagaaatttggtacgtacagtgcagaggggaaaggcggctttagtcatctgctgtcattcctttcactgggtccttttgtctcatctggaacaaaaaaagcaggacaaatggaaggctcctgctgctgatggaactcctgccttctcagtcctgcccataggtggggtggggcatattttgtgtaaaaagcaagacactggaaggacggaagaattctgcatatggactcgaagccatacatttccagatctgtgtcactggtctcaccatccatgatttctagttctctcgtgtcacggtgtttgaagcaccttttttttttttttttttttggtaaagaggtgtgtgtgggggggtcttcctatgttgaccaggctggtcttgggctcctggcctcacacgatcctctgcctcaacctcccaaagtgctgggattacagcataggtgtgagccaccacacttggcccgtttcattcatttattcattcaacaaatacttatgaaacatctttttttttttgagacggagtctcgctctgccgcccaggccggactgcggactgcagtggcgcaatctcggctcactgcaagctccgcttcccgggttcacgccattctcctgcctcagcctcccgagtagctgggactacaggcgcccgccaccgcgcccggctaattttttgtatttttagtagagacggggtttcaccttgttagccaggatggtctcgatctcctgacctcatgatccacccgcctcggcctcccaaagtgctgggattacaggcgtgagccaccgcgcctggccgaaacatctttttttgtgtgtgtgaggagtcttgctctgtcgcccaggctggagtgcagtggcgcaaagttggcttactgcaacctctgcctcctggattcaagcgattgtcctgcttcagcctcccaagtagctgggattgcaggtatgcaccatcacgcccagctaatttttgtatttttaggggagacggggtttcaccattttggccaggctgatcttgaactcctgacctcagatgatctgcctgccttggcctcctgaagtgcttggattacaggcgtgagccaccgcacccagcctcagtgaggcatctctttagtgctagggacttccagagggctgggaatatttagctgtgaactaaacagaccagttctctcctcaaggagcttatattctggggcaggatgggcagagaacaaacattcatctatgtcagctaggactgtgggctgctcggatacagaatgactgtgggtaagtgctattttaggtagttacagaagcttgtatgtgaggtttgagatgaaacctgagagaaatgagggagaaaatcctgtggctctccgggagaggagttcccggcagagtaacagaacttccctttcctgacctgtttaaaggtgggcacaatgtggtgtcagaactaggcacaaggatgcagaggtggaaagtgcaggtgcaggtctcagatccacagatgtgcaaggctgctggaaaacaggatgggggcttctgtggaagcaccaagtggtccctgtcactggcaccttccaggcagacatcactggggatactgtagacgtcatctctctaaaatcagttctgatttgaaaactccattctatgtgaagaatgtcaataagtatttcttcactatccattagttttctgctcaacttttgttctttataatgttcaacaaattttgagcacctaagagcatagctgctagaatgaaactccctagactgtattgttttgtttgagacagggtctggctctgttgcccaggatggagtgcagtggcgcaatcatggctcactacagcctcgactccctggctcaagtgatcctcctgcctcagcatcccaagaagctgggactacaggcatgtgccaccacgcctggctttttttttttttttttttgagacacagtctctctctctgtcgccaggctggatggcagtggtgtgatctcggctcactgcaatctctgcctcccgggttcaagcaattcccctgcctcagcctccccagtagctgggactataggcacacgccaccatgcctggctaatttttttttgtattttaatagggacggggtttcaccatgttggtcaggatgatctcaatctcctaacctcacgatctgcctgcctcagcctcccaaagtgctgggattacaggcgtgagccactgcacccagccacctggctgattttttattttttcggtgtgtgtggggacagggtctcattgtattgcccaggctagtctcgaacccctggacttaagtagtcctcccgccatggcctcccaaagtgctgggattacaggaatgagccactgcacctggcctggattgtattctgactccatcactaattgtatgaccttgagtaagttactgcaatgctctctaagcctcagtttttttcttttttctttttttttttttttttgagacggagtctcgctcagtcacccaggctggtgtgcagtggcacgatcttggctcactgcaagctctgcctcctgggttcacgccattctcctgcctcagcctcccgagtagctgagactataggtgcccaccaacacgcccggctaattttttgtgtttttagtagagacggggtttcaccatgttagccaggatggtctccatgtcctgacctcatgatccgcccgccttggcctcccaaagtgctgggattacaggcgtgagccatcgcacctggcctttttttttttttttttttgagacagggtctcactgtgtcactcaggctggagtgcagtggtgcgatcaccatgcaaggctaatttttgtattttttgtagagagagagttttgccatgctgcccaggctggtctcacactcctggactcgagcaatccacccacctcagcttcccaaagtgcttagattacaggtttgagccactgggtatggcctaagccccaatttctataataataaaatagagataacagtacataggattgtgatgaagatttaagatgtgcggtcaggagttcaagaccagcctggccagcatggtgaaaccccatctctactaaaaatacaaaaaatattatctgggcattgtggcaggcacctgtaatcccagctacttgggaggctgaggcaggagaatcgtttgaacccgggaggtggagcttgcagtgagctgagatggcaccgctgcactccagcctgggcgacagagcgagactccatctcaaaaaagaaaaaaaaagaggttttcgtgtacttagcagagcagagtgcctgacgtggagtatgcactgagtattcggggcctgtgtagagatgaaaattactggagacgcggttccaaatgctgtttatgttatagaatacaaaattattattgtttttgagacagagtctcgctctgtcacccaggctggagtgcagaggcaccatctcgactcactgcaacctctgcctcctgggttcaagcgattcttctgcctcagcctcctgagtagctgggattacaagtgcacaccaccacgcctggctaatttttgtatttttagtacagacggggtttcaccatgttggtcaggctggtctcaaacttctgacctcatgatccgcccgcctcagcctcccaaagtgctgggattacaaacatgagccaccacacccggccaataaaaaattatttgagaccctgtttcaaatgttgtttattttattctttcgttccagacactgtcctatagcaaaggagatgtgtatagaagctctgaagaacctggaattttaagccatagcccacttcagaattgtattctagtcactgaaaatttaatactgccacattttgtggagattctatctctggcagtagttctccactgggaaacttttttttttttttttttttttttgagacaaggtctcactctgtcgctctgtcgcccaggctagagtgcagtggcacgatcttggctcactgcaccctccacctcccgggttcaggcgattctcctgcctcaaactcccgagtagctgggattacaggcatgtgccaccatgcctggctaattttctatttttagtagagacgaggtttctccatgttggccaggctggtcttaaactcccaacctcaggtgatccgcctgccttggcctcccaaagtgctgggatgacaggcgtgagccatcacgcatggccagcttgtcatatttttaaaagacaactctgtgatgttagattggaattagatgcatttgtgtgaacatgatatatgacgcagatacagaaataactataaatgtacaagtcccctagctctatcctatgagaaggtctgggagctgcaataccctagtggaaataggcacaccagcaaccagatctcatttccaaacacccccctccactatatggaagcagcgctccttgaagatgtggccagttacagggtcatgaaaaaacaagacaaacccagaacaccttgtgcttcaaggcgacagcagtaacctcaccagtaactggacagaaagacacagaataggataaaaagaacagagtctgtgacattcaggcttcaagtacacacaggtggggtctaatcatgcagaaacatcaacgaatccacattgaaagacattctacaaaatgatcagcctataacctccacaaacgccaaaatcgcggaagttcaggaaaactgaggagtggcaccagatggacagaaaggagagctgtgatgaatggggtgaagcgcgtgattctgggctgtagcctttgctctaaaggaatagtctctgggcaaaggagtgtacaggagttcttggcactgttcttgcctattttctgttaagtttaaaactctttcataatagaatttttaaaaagacaatttgctcactaatgaccatttacaaaagttttcaataatcagataatttaatatcatgggagcaaagctccttctcagccggctccttacacatgctgagagttcaccacctggcttcagttactaatgcaaagccaggtcctgttttcccaccgcttgaaataagatgcaacctcctaccaggaacatgatagcttcccctactgtcagaaacaaggttccccataccactgaaataaaattcattacttcaatctttttttgtttgttttttgagacggagtcttgctctgtcacccaggctagaacacagtggcatgatgttggctcactgcaacctctgcctcccgggttcaagtgattctcctgtctcagcctcctaagtagctgggattagaggtgcaccacatccagctaatttttgtatttttagtagatggggtttcaccatcttggccaggctggtctcgaactcctgacctcagatgatccacctgcctcagcctcccaaagtgctgggattacaggtgtgagccatcgcacccagcccattacttcagtcttacaatgatctaagaatgcttatttcctgtttcctggggcctacacgacatgagagatttatctgatgtttgtggtgttcctcagatttagccaatgtaggctatacatacacatataatatggctgaagaaaatgtgtatgtgaaaataggaaaatagaaacttcaatcctggttggttggtttgttttgagatagagtttcgctctgttgcccaggctggagtacaatggtgcgatctcagctcaccgcaatctctgcctcctgggttcaagtgattctcctgcctcagcctcccgagtagctgggattgcaggcgtgcaccaccacgcctggctaatttcttgtatttttagtagatggggtttctccatgttactcaggctgtctcaaactcccaagctcaggtgatccacccgcctcggcctcccaaagtgctgggattacaggtgtgagccaccgtgcccagccctggtttgtttttgtttttaacagtggtttcctttagggaatgaggccaggggctgaaacaagaagacttttatttatgtattcacctattagttatttggacttctatttttaaattttttttctatcttttgaaaatcattttgaccattaagtatgaaatacacctttgatctaaaaaaatagtaaagtgtcaatgttaatatccgagttattacattgtactatagttttgcaagatgttaccattggcaaaaactgggtaaagggtacatagatctttccacgttattttttataactgcaagtgaatctttcaatcatttcaaaataaaaggttcggtgcagaaatgaagctggctgggtgtgttggcccacgcctacaatcccaacacttcgggaggctgaggtggaaggatcacttgtggctgggagtttgagaccagcctggacaacatagcaagatcctgtctctacaaaaattaaaaaaattttaaaaattaggtaggcgtggtggcctgcacctgtagtcccagctacttgggaggctgaggtgggtggatcagttgaatccaagcgtttcaggctgccatactccagcctaggcaacagtgtgagaccctgtcttgttctgtcgccaaggctggacagtgcagcagcatgatctcggctcactaccatttctgcctcctggattcaagcgattctcctgtctcagcctcccaagtagctgggattacaggcacacaccaccacacctggctgatttttgtatttttagtagagacggggtttctccatgttggccaggctggtctggaacttctgacctcaggtgatcagcccaactttagcctcccaaagtgctaggattacaggcttttgagccaccgtgccttaaactgtatttaaaaagaaaacagggccaggtatagtggctcatgatggtaatcccagcactttgggaaaccaaggtgggaggatcacttgagaccagtaattcaagaccagcctgagcaacatattgagatcttgtctctaaaaaaattagtcaggtgtagtggtgggacctgaagtcctagctacttaggagcttaacgtgggaggatcacttgagcccagaagttgaaggctgcagtgagctatgatcacagcactgcactctagcctaggccacagagcgagactgtctctcttaaaaaaaaaaaaaagaaaagaaaacaaagctacttccataattggggatgttggctgatgttccagatggtctgcaatcactgccagcaggttggagggaattaagactccctgagtggctgggcatggtggctcacacctgtaatcccaacactttgggaggccgaggcaggcggatcacctgaggtcaggagttcaagaccatcctggccaacatggtgaaaccccatctctactaaaaatacaaaaattagctgggcgtggtggcgcacacctgtaatcccagctacttgggaggctgaggcaggagaatggtgtgaacccgggaggcagaggttgcagtgagccgagattgcgccactgcagtccagcctgggcgacagagcaagactccatctcaaaaaaaaaaaaaaaaaaagagagagagagactccatgagggcagtgtcatccttcacatatagggatcctgcagcctctgcagctcctatgaaagttttagaggctgggcatggtggctcatgcctgtaatcccagcactttgggaggccgaggcaggtgcattgcctgagctcaggagttcgagactagtctggccaacatggtgaaaccccctctctattaaaaatagaaaattagtggcgtgtagtggcgggcgcctctagtcccagctacttgggaggctgaggcaggagaattgctagaacctgggaggtggaggttgctgtgagctgacattgtgccagtgcactccagcctggcgccactccactccagcctgggtgacacagcaaggttctgtctcaaaaaaaataaaataaaattttagattcttggctgggcacagtggctcacaactgtaatcctagcaccttgggaggctgaggcgggtgggtcacctgagctcaggagttccagaccagcccgggcaacatggggaaaccctgtctctactaaaaatacaaaaattagccaggcgtggtggcgggcacctgtagtcccagctactcaggaggctgtgacatgagaattgcttgaattggggagttggaggttgcaatgagccaagattgcaccactgtactccagcctgggtgacagagcgagactctgtttcaaaagaaaaaaaaaaaaagaaaacaagttttcttaacattttttaagtgaattctcttttctgaatctcattatctaaagagttaatggccaaaggccaagaggtacttgttcagtgaattataaaacgtcctcaacttctgtgagccacagtttatctataaaatgaaactaatacctgtgttacaggttgccatgaaaactgggtgatgtaatacatgtgaaactcttagcatacgtgataggcacacaggaagtcctcaataaatgttagcttctattaataatacaaatatttttattactaccatatttgggagacagtgagttccccattacaggcagtaatcaagcaaaggctggtagggaagcttcagagagtactcaagcactgaacatataattggaccaaatgacctttaagatacctccttccatttttcagattatgggcctcttaagagagtaagagcttgggaaagggagaaaaaaggcaagttggggagaaagagagagacagaaactgctttcctacaggcacatagttccagaaattttttctttttagggcgaagaactaatctctcgatgccttgcttcccaaatcttcaagcctcattcaagaatggtgggtccgcccggacagggactagagttacagcagtgatgactgtggccttgcagtgacccttcatcactcacaaacaaaatctgcctgcactagacgactatgtactggcttagagactaacagtcataattcctattccaagtgtgcagttcatcacggtgcatggaagacaggcatctatctctattcctcccccaaaccctatgacatgacagtaaaggaatttaaaaagataaaaactatgaagacaacaggaacagaggacaccacagcaggtaagagccagttaacaaccttttgggagatggaaaaaggacagaagagtcagtagctaatttgcagagcagcaaaagctgaacctaagtgcctggaggatggagagcggagaaggagctgcaggttctgcaaaggctcaggaactggaagcaccaggtcccgctgcagatgggagtaccaggtgtggctcaaaactggtgactttttgaaagtccaaatggagaacggttaggaactggtgttcccttctcctgctctggaagtcaagcaaccaccctcctttccttcacagcaaaagccaggaggttcactctctgaagcgctgagggaaccctgacctcaggaccccaggtgctgctagggggaaggtgggcaagaggcagaatacgacggaattaaagttaaagcgaatcaatggcacaatgagcccactgggacccttcctcagtgtggcctccagaatgctggctgcctgcctgtctcccacagcaagagacaggggagtcctctatagggaaagtgacaagcctccgtgaaaaaaagactcgaagtcctgaggtagaggttcccgcccccgaatgtaactaccgagtaccctgaggtagaggttccccccactgtaactaccgagtacaagcgggcgcctgtagtcccagctactggggaggctgaggcaggagaatggcgtgaaccagggaggtggagcttgcagtgagccgagatcgtgccactgcactccagcttgggcaacagagtgagagcctgtctcagaaaaaaaataaataaataagaaaaattaaaaggattttgagcctgggagtttgaggctgcagtgagctatgatcatgccactgcacgacgccaagcactccagcttgggtgacagaacacaacctcacctcttaaaaaaaaaaaagaactactaagagcatcagcatagattatttgaaagtatggaagtaattaacaaaagcaacaaccatcggaattacaaggggctgcttctgaggggtgggactcataatcctgggatgctgagttttaaaactacaaaatataactttgatgaaacatatatttttagatagacaaaaaaataaaaaggcaagccacatcaagcgtagtcagcacacaaaggtcctgcacagttgctgaagagaccacaacatgtaccacaatgaggtggacttgctttctctcccactgcagatgagttttaaaattctaattccaaagagagtttcttctatttgcagttatcctggaggacagtgatcacctaagcttttggcatgattctccatggaatggagaaagattttcttttctttttctttttttccttgagacggagtcttgctctgtcgcccaggctggagtgcaatggcatgatctctgctcactgcaacctctgcctcctgggttcaagcgattctcctgcctcagcctcctgagcagctgggattacaggtgtccgccaccacgcctggctaattttttttatttttagtagagacagggtttcaccatgttggccaagttggtctcagactcctgacctcgtgatctgcccaccttagcctcccaaagtgctgggattacaggtgtgagccaccgtgcctggccgagaaagattttcaaaagggtctgagagattaaaaaataactctctaacactgagggctctcaaagtttggatctgaacaaagcagatccagtagatcctctggagagttcttctagctccaagaatttgagttctacccgaaggaatgaaaggtggacagcaaatacttccacgaaccccaacatacgtcatgctggcctttgtcaggcagtggatggctgaagctccaggctaaaactccaatgaaagtctccatgtttcctcatttgttaacattttccctttctttttgtcaggactagggtgaccaaaagcctcaggcttctcttacacagtcacaatcaccagacccctggacactgaggtctaccccttcctaaagatccttagcgaaagaatcagggactgtgccccaatgaaatcctgccacttccctgctaaatgtagctaaatgaataaccaaaacatctgtcttcaagaggaaccaactcagtgcaccacttaccagtgagtcagcccaggaaaagtgtcattctggatggtaaaaacagttccctgcggggttccagaggaagaacttctggacccaattttcgccctagaccagcatggtgaagcagacaccgtccgtgcagcatgggcagcatgggcgcccaagcctggctctcacctgaggccctgcaggagagctgagtgggctgttgcaaagcaatgcctctactggatacccaaactccatgccaaccccacctggggcaaggagggagaagtgatggcagttcttatgaaacagagcttcctgccttatcatatttttagctccaagatggcaggagggcccaaaattgcatttagagggaggagtacaggggagtgattaagagctgtggttccagggccagagagtcctgggctcttactctgaccatatcacctgcaagacggtgtgacccagagcaccgcagcattgagctctcagagcctccacttcctcatctgagggtagggagagcagcagcgcctcctcatggggtatcgtgaagactgcagtaggtaaaggccctcagaatggtagacggcacacagtgagtgcttgaatgttactaactgacaatctcctctgagtgggcctctcaaggaagcatcagcatctccaaatgaggcatgagaagtgctgggtctttaggctcctaaggaacagggaaccctccttctgcgatccacgccaagaccaaaaaaagaaaagcaaaagctctcaactctgatagctcaaaatgaccgtagacagccgccagctgtcagctcctgcgtgcgctgtggctgtcctctgtgggtaatgtgcatggtattcacaggtcagcccagcctgcctcctcccagggtcacctccagctctgcagccccgcacgctctttcccaccaggctctgaagcatcgctgtagcagctgtattacccacttggcattcggcacatactgccatttttgtctctgtgggtatgccaagacttcaactcaactgtcaattcaagagcacaggctgttttcttccgtatagtgcccacgtactgcccaggataccgtccctgtagcagacactgacgtgttcccagaactacaggatggtgctctcggtgaagcgccccagcaaaacagtctccttaatcttcgtttgtttatctaattgagagcccccagagcccccacttacttcatccagctgtctcttcgtctcttcttccatccttcgaatgtcgtccatggtcaggtcaacccacttatcgagccaacagaacagctgcctgtggaagtttgtaaacagacgcctctcttgctatagaaaggagggaaccacgttagaacgcagaaggcaaaggctgctgccacagcccttctctccatgcactccacacgaatacccacactagactggggacgggcggacaggaggaggagtaatgcccggctggttatctggaccagccatgggtcaatgacctttgccttcacgtgtctaacaggtatggcttcacataggagggagcccccaagaaagaaggatgcctacctcacactaggccctctgcccaaagcaccagcaagacagcagcccatgaactcctaggcaagccaagggccccaaaccactgccacatttcttcctgtctctggtgtctaatgccagattaaaactggccagcagctatgaaatatggcccaagtgaggctcaaacatgtcggaggattaaaaggctctaaaactccttagacctgcccagcagagtaattcagggcaccggccaacctggctcccagcacctcttgcctttcagctgcaagaaaagaaagactgagttttatctgtaggtcagtcatagcaagtcccttcctgtggccttcttttgcctcagtttccttccctgtcacatgtggtgtccctggaaggacagcattaaaccgtaagacatttcagtgcaagggaaggtgggcagctgggaagccgccaaactgtgaggtatgctcatgttggcaaccctgtcatgcaggccacatgggctgggccatcttcttcactgggccaaacaccccccaccgcacacacacgcagtcactgggaaggcctcagccgagctacttaccttatggatgaagttctccaccaccccccaccgcacacacacgcagtcactgggaaggcctcagccgagctactcaccttatggatgaagttctccaccacccccccacaacacacacacgcagtcactgggaaggcctcagccgagctacttaccttatggatgaagttctccactttgttctgcaggccccaccacttgaacttgacggtcaccagtttgtatgcacacatatatgggcagtccttctggtttacaagctcttgctgcattagaaacatacccatgggtacgcaagtaacaacgggcagacctcaggccgtccccagctcaccccagccatgcccctcctccacagggagcggcccacccacatgctgcccagccccctggcagtgaaggtgtgaatggtaccttccaattggggcccaagggtcctcggcctgttttgatagatttaaattttgctgggtcttcctctgccttgtaatcctgagagaaattgtggaattggggttggaggggagtgggagagggagtgagagatggggagaacagatctttcattagcattcactccataccagatcttgatgctgatggcacaaagcaaatatgggaaaatgttataaacaagatgtagaactgtttacattagcctcagaggagagttctatgtgattttctccgatagggtttgttttccattttgccagtgtgaaagtatcaccagactgtctgagcaggcacatatttaccgtgttgaagacagagactttcaacctggggtgagcatccagatcaccagggaagacctttttaaaacacagatttttgagtcactccaactaaaacccagtgactgagaatatctgcaggtgacggcagcacagatttgttttttgtttttttaaatctctgcaagtgactctaaaatacagccagcgctcagaatacccggctgtcattccttaaatcttccagtgcaatctccctctggcttgttttaacaaaatcattactggaaatgttcagtgtatggaacctatccactactggtgagtctcacttcacagatttataatgcagtcaatttcctgtgttaattaaccacaacaaaagtttaattttcagctgtccctctacattgactaatgtgggctcaggagatacaaacttatagcatctacttaacaaaaataacaaagataataaatttctctctctcataaagtatttcccaaagctgagaagttttttttttttttcttttttttttgagagggagtctcgctctgttggccaggctggagtgcagtagcgcgatctcggctcactgcaagctccatctcccaagttcacgccattctcctgcctcagcctccccagcaactgggacgacaggtgcccgccaccatgcccggctaattttttttgtatttttagtagagacggggtttcaccgtgttagccaggatggtctcgatctcctgacctcgtgatccgcccaccttggcctcccacagtgctgggattacaggcgtgagccaccgcgccctgccttatttttttattttatttttttgagacagcatctcactctgttggccaggctggagtgcagtggcacgatctcagctcactgcaacttccacctcctgggttcaagcgattctcctgcctcagcctcctgagtagctggcattacaggcgcctgcgaccacgccagggtaatttttgtatttttgtagagacggggtttcaccatgttggccaggctggtctcaagctcctgacctcaggtgatccacatgcctcagcctcccaaagtgctgggattacaggcatgagtcactatgtccggccgattttttttttttttttttttttcagatagagtttcgctctgtcgcccaggatgaagtgcagtggcacaatctcagctcaatggaacctccgcctcctgagttccagtgatcctcctgcctcagcctcccaagtagctggaattataggcatgcgccaccacgcccagctaattttgtattttttttttttgacacagtttcactctttttgcccaggctggtgcaaaggcatgatctcggctcactgcaacctccgcctcctgggttcaagcgattctcctgcctcagtctcctaagtagctgggattacaggcacctgccaccacgcctggctaatctgttgtatttttagtagagacagggtttcaccatgttggccaggatggtctcgatctcttgacctcgtgatctgcccaccttggcgtcccaaagtgccgggattacaggtgtgagccaccgcacctggccctaattttgtatttttagtagagacggggtttcaccatgttggccaagctggtctcaaactcctgacctcaagtgatatgcctgcctcggtctcccaaagtgctgggattacaggcgtgagccaatgtgcccagcctctgaggagattatatttatgtgtgctttaaaaaataaatattcaccatcactgcttccctccactcacacagatcaaccagagttgacaaaatactcaaagaatcatactttttgctagtatccagtttgagaaaattcatcaagctgcatacttatattcactttgctgtatatgttaaacttccataaaaagctttttgaaaaatccaccaacgttttgaaggtgggggttgggatattgggcaaggaagcacaagatggtttttatatcttttcggaaatgcacaaatcaaaataactttgtgtgtgtgtgtgtgtgagatggagtctcgctgtgtcgcccaggctggagtgcgatggtgtgatctctgctcactgcaacctctgcctcccgggttcaagcgattctcttgcctcagcctcccaagtagctgggattacaggcacgtaccaccaggcctggctaatttttgtatttttagtagagatggggtttcaccatgttgggcaggatggtctcgaactcaggacctcagatgatcggtcaccttggcctcccaaagtgttggaactacaggcgtgagccaccgtgccaggccccaaaatatcttaagtgcagagtgaccacaggaaagaggtatcacacccctgggatacaaagagcaaacacacattccctatcagtgggcagagagttacattcctgtcttttaatcccaatgaggcctctgcctagtaagaatggtaatgaatgaggaggaatctaaccccctcattccctgagcaaatacttcttgggtgcaaaacagtgagcaagccagacctggtccctcttttgaccaaggtcatggtccaccagtggactgtccttttccaggggtctgctccagtgtgtgttactctgaaaaggcgccaccgacttctggagggcaggggacctgtctttccctgcattctgcatccctcacctggaacccagagatcctgacaatattccacaacccagtaggcaggaagtaaatgtttttttaattactgagttggaaaaataaatttgagaagtggtgctccgatttttcaggctaagcatcattttagcagggcaaaatactctagctacaatacctacttagtccagtaataattttcagaggccaaacagggcacacaaatttgggccactaattttctggtggcatccccaactcaagacaagaaatctcctaatactcacttttaaaaataaaacaagcaagacacatcagaatttccttttgtgccaagttgggtatggtttcctggtttctttagcattgagaagtcatttctgcgtctcgaaggccacccacgtctttaaacggatcctaccttgctgagcacttggcttcgatctgcaatgtctatatatacggcttccacgtgtttccacgcctcaggctccagcttatgcacctgtgggaacaagtggggaaccactatgcagtttttgtcagttataaaatatcctttagccagaatggacacctaggaactgccattcccatagccacagatgtaagattcctaatgataagtaattatacaattacatacaaaattatccaaagaaatgggagaatggatttttttttttaagagatggggtctcaccgtgtttctcaggcaatggctatccacaggagtgatcacagcacactctagcatgaactcctgggccggagtgatcctcctgcctcaggctcctagtgatcctcctgcctcagcctcctgcctgggaccgagggatcctactgtctcagcctcctgcctaggcccgagtgatcctcctgtctcagtctcctgaggagctgggcccgagtgatcctcctgtcacagcctcctgaggagctgggcccgagtgatcctcctgtcacagcctcctgaggagctgggccctagtgatcctcctgtcacagcctcctgaggagctgggcctgagtgatcctcctctctcagtctcctgcctgggcctgagtgatcctcctgttacagcctcctgaagagctgggcccgagtgatcctcccgtctcagcctcctgaggagctgggcccgagcaatcctcctgtcacagcctcctgaggagctgggcccgagtgatcctcctgtctcagcctcctgaggagctgggcctgagtgatcctcctgtctcagcctcctgaggagctgggactataggtgcacaacactgaacccagctggattgtctgtttgtctgagatggagtcttgctgcgacgcccaggctggagtgcaatggcgcgatctcggctcactgcaaactctgcctcccgggttcaagcgattatcctacctcagcttcccgagtatctgggattacaggcgtgggctaccacgcccagctaatttttgtatttttagtagaaacagggtttcaccatgttggccaggctgatctcaaactactgacttcaagtgttccacccgccttggcctcccgcccagcccccgctggattttaagtgacatgactgagaacgaatgctctgactattgagggtaaacgtcacttctgcaggtcaaaacgccttccggatgtttacggtgcccacaccatttccatgtgttcccggctgtacagactgtaaacccttctagagatggtgtctgtttagcaacatgctgacccgctgtaaagactgtaaacccttctagagatggcgtctgtttagcaacatgctgattattttgatcaggctgtacatgcacataatacaaaattatgacacaaattcaaaattacaaaaggatacaatatagagtaactagagtaactcctcttcttgcttgtccctcgtccccagtctagtaacagccacctctaagagatcctacatacaaacatccatgtgcgtggatttttcttttaatatgaagggcggcatgcacacaccttgtttcataacttccatccttcactgaacagtcaacttgaagactgctctctattggtttttccatggctgcaaggatgtcactatttggctgaaccacaatgcatttaacgttgtcctactaacgggccttttttttctctttttttttttttaagacagtgtctcgctctgtcacccaagttggagtacagtggcgtgatctcggctcactgcaagcttcgactcccgggttcacgccattctcctgcctcagcctcctgagtagctgggactacaggtgcccgccatgaagcctggctgttttgtatttttagtagggacagggtttcaccgtgttagccaggatggtctcgatctcctgacctcgtgatccgcctgcctcggcctcccaaagtgctgggattacaggcgtgagccaccgcacccggtctaacgggctcttatgttgtttttttgtttttggagacagggtgtcactctgttgcccaggctggagtgtggtggtgcagtcacagctcactgcagccttgacttcccagcctcaaatgatcctccagcctcggcctccagagtggctgggaccacaggcacataccaccatgcccagctaattctttttttatttttggtagagacagagtcttgttatgttgcccaggatggtcttacattgtttttgatctttggctacacaaagaagactgcaatgagtctccttgtatatatgttatttcacacatgtgaaaataactgtctaaattcttgggcatggaaatgctaaaggataggtgtattttattttttgggagttactgcaaattgtgctctatagaaaactgtaattttggtcttttaaagatatagctcccatgtaccaggaactgcaccaatccaagcagtacgagaaggccccataaaaagttccggagatcacattttgcaaatcagagacatagcaatcccatgctggtaagataggtctaggcagaggccactgccttcccggccaggcaaaagaggaccacagagaggaccccatggtagccctggagaggctacaaggcagagactcaagacctcacccctggggcttttgggaactactactcacattctcctgcgtgccaagatctggtttgtgccaggtttcaattttaatcagaaagtcttctttcatgtactcattctggaagaaggaaaaaaaatacatgaaagtcactaggttcacagttgagagtaaccatctcccattactggagatgggcattactggatcatgggcagctaggagattccagcctctgccttgtaataacagttaacttgactgggagcccacgacacactaggcatgtattatcccattcaatcctcaccccagcctgagagctctgtagaatcaccctcattttacagatgaggttcaaagaggttaggtgacttaaccaaagtcacagagatcgggccaggcatggtggctcacgcctgtcatctcagcactttgggaggccgaggcgggcggatcacttgaggtcacaagatcgagaccagtctggccaacagtggtgaaacccgtctctactaaaaatacaaaaattatccaggcatggtggcgggtgcctgtaatcccagctactcgggaggctgaggcaggagaatcgcctgaacccaggaggcagaagctgcagggagccgagattgcaccactgcactccagtctaggaaacaacagcaagactccgtttcgaaaaaaaaaaaaaagtcacagagatcacgacagagttgggtctcaaaacagtttcgtctgacttcagaatccatgcatttagccactctgggtagtaagcagtgtggaaagagcacagaagacttcctaacccatcgaagatactcaccatggcccctttccctccaactagcctgtggctaaggccttaagttttcttctcagtaactgaacccttcaagctaattattgcctccctccctcccttcctgcttcttaaaaattggaacttctcaaaggaggaacacattcacccattaacgcctcagcaggaaccagtttcccagagacagccagtgtttaccggcagggacaaggcactcagatgagtgtgctgaatggtgggcgggtgggcaatgacagaggggacggctgtggaagagaaaccccgctgacttcacgactttgccaaggatcagtgctcagtggactcaacagatgcacagatggggaagggatgtcggtcaggtcagttgaatggagctctctctacaaccttgaaaaggtgtgacctggggaggcagggcctcgagccactgtgtccatgtcagacccacagccaggatgcacttaatggagccgcaggccaatgcagcttaaagcaggaggtcatcatgccagttaacaggttccttgttagtccactgacaggactgagcctcagcaactccaaacatcagccaagggaaagaacacccaagaccaccagtgcagttacatttttctctctcctgttcttatacatcatctacagttccaacccccttgacaatacttactgtaataactgctccgaggcaaggacatggaaagaagagagaaaaagattaatgaagatgaagaaatatctgccccccaccccccacaaggaggacgaatggcagagtgtactttactccctgtggcttattccacggtcacctccaagccccagtgagtcagaaataccttaacgcaccaaccctcaaatttcactcagacaaacatcccaaaaaaccaaacagggaatttaattaaagcgacgccgctatgggcttcttgggattcttttcagcagggcactgacagggaccagctctgatcagcagaggtgccgcaactcatcactctggcatcagagcgttctccggcgcctcccacccctaccccagcctctacctcccggggcacagagcagggtgctttggccatgcactgtatctgcctcctgcacccttcctctcgctgtaatcaaacctcccaggctctgcactcctgctcattgtaatgggaaccccttagaaagcatggttcaattatttatcagagaaaatgactgcacctctcatgtcactggggaacagactagctctgctcctgagaccgcccggttcattctgtaccctctgaatttaggacctatgtccacttctgctggctgccccactgccatgtttgtagagtgtgtggggtaacaaactccagaactgaagttaaggtgaccccggagcacaaaatgaggcaaagttgaaatataaagagtaagagctatcacgcacagaaataacccaaaagactgtcagtaattcccccatacccaacgaaagacacttagaaggaagcaccagattaagattacaactgaaaggcctacactgaagtaactgccctgttagcagcttcaagaaaaccacgttagaataagaaaaggaaatcatgggtatagtatctcgtcagcagaaattctcctgtgccgtggtgggccccggaggcccagcccccgcatgtggcatctctggcagcgccatccctggagtgggggcagcagtgccaggatggcctggtctgatgacaccagccactaaacttctccaactaagcaccttttttgaatctatctcctctaagaaagtctctcctagttcggcctctccgagacgtgctcatcaatggacccaagaatctgatcactcagccaagcggacattctttgccacacattggcattctgattataatttggtttctcatgtagaagaatccacaagaaaagaatgccctgatcatcgaatgggaatgtcccgtttcggtagcaattctgcgttttagtgtaacttcatagactggcgctggggtttttacacattcatctttgtgagaccccgagagacagatccactcagttctgacaacctggttttccgaaatcatgagggtgacagcccttgctgaccttttcatgcaaacttgggtgatcaaacaatcctccccaaaccttctccagccctcccaggccctcaaacacctctgcattccagtattccctgttgttcaaactgtaacccaaagtacacagaaaagccgcaggaaatcttttgcagtgggagagcagagatttccaaatgagactaataaggcattttaaatgcatggcagggccgggcacggtggctcccgcctggaatcccagcactttgggaggccaaggcgggcggatcacctgaggtcaggagttcgagaccagcttggccaacatggtgaaacctcgtttctactaaaaatataaaaattagccgggtgtggtggcgcatgcctgtaatcccaggcactgtacccacacatggaggctgacaggaggaggaccccacagcccaacactgtctgttgggaggctgaggcaggagaattgcttaaacctagcaggcggaggttgcagtgagccgagattgcaccactgtactccagcctgggtgacagaatgagactctgtctcaaaaaataaaaaaatttaaaataaataaataaaagcatggcttagtgatactgtatccagccgaggactatagttccaggaagagatggaaggagaaacaaactttcttttccttttcccactttcattcattcacagaccaactcctatcttaccctctcctcacttccagcccatcccatcagcttcaagggaaaaagagagagggaaacaagctaagaacagcaagagctgatcattaccagggtgtcccaatctgttttcactccgctcagagaaaggaagagccttccaaaagccatgaggcattttacttcatgctccttcatctatcttccttcaaacttggatctactgaggccaagctaagatgtctgaactaataacctctctcccatcagcccccagagggaactggaaagtagccttccttgcctgctggtatctcttattttaaaagagcaagtgtctaactaaacagatctaagattcaacatatccattctgtgtgaaggtgtatcctgaataggaggtcagcacccactgaggaaaccaaccttccttcccctactccctgtctccatgaaatatttagaaattacatttttccagtggagctccagtggcgcaattggttagcgcatggtgctgatacagaaattatgtttttcttttcttttggccaaggatcaatatatgaacatttaacgtgcagaaaaatgcccatgtcagccgcaacactcttcccagaatgacacagagaacaggggcatctctcagttggcacaagctgtgtacccagaaccctgccccaggcagggagatgtccacacttgcaacacatgctcactgcgactctcttagacatcaagaaaatccacctttggccctagaccagacacacccagccacactgcatactgcctttttttttttttttttttttttttaataaacggagttttgctcttgttgtccaagctggagtggaatggcacgatctcggctcactgtaacctccgcctcccaggttcaagcgattctcctgcctcagcctcccaagtagctggggttacaggcatgcaccaccatgcccggataactttttgtatttttagtagaaacggggtttcaccaagttagccaggccggtcttgaactcctgacctcaagtaatccgcctgcctcagcctctcaaagtgctaggattacaggcatgagccaccgtgcccgaccctgtcttttaagaacatctgtgcatccctcatttccaagaatctaacttccagcccagtgcttaaggagtagggagggctgtgcttcagctacagcaagaaaactctaagggttacacatcccagaccccaccaatgaccgcaaatctcctgatacaaggtccctgaacctgtgtggggccactgagggttggaaagagcaatgaccccgtattctggattgcagtcattcccaaagtccacaggataagggtgatatgcgtcacgtaaggatcccagactcatcagactctagggagtaccaggtgccaacaaagaaagcaagtgcaggaggacaggtcagcagaggctggtgggaggaccccgcagcccaacactgtctgtacccacacatggaggctggtgggaggaaaggtcacctacctcacagacaagtgccaggggacctctcaggactccccagggttatgaatcagtaccagcttaggccctcccaacaggtctattcctagatggccctggaaacctaggaatcttggaaggctaagaatctgaatcactcgaaagaaatttaagaatgtctggactagaatagaaagttctctgtggaggttcaaatctttcctttcctttcaagaaactctatgcaggagactggccaagattaagaaaataattatacctgtatcctcaattacagaacatgctgtttcagcagaagccacagttcattcatatgatggaatactatgcagctattataaattaaaaaacaaaacaaaacaaaacaccagacaccttagtgacaaggaaaatgttatccattcactgaagaaaaatgagaaacttaggccaggcacagtggctcatgcctgtaatgccagcactttgggaggccaaggtgggaggatcgcttgagcccaggaatttgaaaccagcctgggcaacatggtgagaccccatctctccaaaaaaaaaaaaaaaaaaacctagccggacatgatggcatatgcctatagtcccaggtatttgggaggctgaggcagaaggatcacttgagcctgggaggttaaggctgcagtgagctgtggttgtgccactggacaccagcctggacaacagagtgagacaaaaaaagcaattaaaaaattagtaatcatattagtaatcccagcattctgggaggccgaggcaggtggatcacttgaagtcaggagttcgagaccagcctggccaacatggtgaaacaccgtctctactaaaaatacaaaaattagccgggcatggtggtgtatgcctgtaattccagctacttgtatggctggggcacgagaatcgcttgaacccaggaggcggagtttgcagtgagccaagattgtgccattgctctccagcctaggcaacagagccaggctccatctcaaaaaaaaaataataataaaataaatagtaatgatctaaaatttttcgagaaaatgtgtctgggctgggcacagtggctcacacctataatcccagcactttgggaggccaaggtgggcggataacctgaggtcaggaggtcgagaccagcctgggcaacatggtgaaactctgtctctactacaatacaaaaaattagccaggcgtggcggtatgcgcctgtagtcccagctactcgggaggctgaggcagcagaattgcttgaacccgggagccagaggttgcagtgagccgagatcacgccactgtgctccagtctgggcaacagagcgagactccatctcccaaaaaataaataaataaataaaaatgactagaaaaatatactaaaatgttataatgaataacaataatcaaaatcgcagcatccccaagtgagagactggctctgtgctctcaggccgtgacgaccggtgcttctcgccctgctgtccaccaagctgtgctggacacagcactgatacccaccatcagccggaagggacccagcccgagcctttccctggcctaatccggaacacgcaggtgggacccacagctctgctgcccgcccctgcctggccgacgtggccccggctgcactcaccggttctgcagtaggggtaagcattccaggctttctcgtgtatattcagggctccctctggggccagcattcgaacaaacgtgggtactttgctatagcggggaaaaaaaggggtataaagagaaatggtagagagaaaggagacaagaggcttttcagatccagcttcttcatggggagctgacaagcaagtttccatgcaatgagcaggttactggtgggagtgagaagttacgtatgagagcctgacaccccaccttggctggctcctaacacacacccacgacgtgccccaccagccaccagaaacaggaccacacaagagaccccaggctacctgctgtggctcatcaccccttccatcagcattacacatttttccagagcttgctgggcccagggcattatactacaaggtgcgagaaaaacacaaaggagatgcctccaagcatgaaccagtctcggtttagggccagggtaactagccgactaacttgggtttgggatccaggattatctgatctgctttcatcagctctgagaggccaggagggcctagaaccatttgcctcccaggacaaagtattttcttctactcaattctttttttttgtttgtttgtttgagacggagtctccctttgtcgcccaggctggagtgcagtgctgcgatctcgggtaactgcaacctccacctccagggtcccagttcaagcgattctcccgcctcagcctcttgagtagctgggattacaggcatgcgccaccacgcccagctaatttttgtatttttagtagagacagggtttcaccatgttggccaggctggtcttgaactcctgacctcgtgatccacccaccttggcctcccacggtgctgggattacaggcatgagccaccgcgcccggtctcttctactcaattcttatctcaggttacagaacaacatgtacagtataagccccctgcttttttttttttttttggtaggtgtgtggtttgacggagtaggaaaacatttagaattttttttttttttttgagacagtcttgctgtgtcacccaagctggagtgtagtggctcgatcttggctcactgcaagctcctcctcccaggttcaagagattctcctgcctcagcctcccgagtagaagggactacaggttcccgccaccacgcccggctaattttttgtatttttagtaaagacagggtttcgccatgttagacaggatggtctcaatctcctgagctcatgatctgcccgcctcagcctcccaaagtgctgagattacagtggcgtgagccaccgtgcctggcctagaaagattttttaaaattaaaatgaaaatggtacatatattccttttccttttttttgtttgtttttgttttttgagatggagccttgctctgtcgccaggctggagtgcagtggcacgacctcagctcattgcttcctccatctcctgggttccagcaatcctccttcctcagcctcctaagtagctgggactacaggcatgcgccaccacgcccagctaatttttgtatttttggtagagatggggttttgtcatgtaggccaggctggtctcgaactcctgacctcgggcaatctgcctgcctcagcctcctaaagtgcggggattacaggcgtgagccaccgcgcccagccgtccttggtttctaacagataatctgtccagtctttggcaagctctggcaacctcatcagctttagtgcctcaggcctaagaaagaagagcaaactagagcagagagctaacctggagcacttggggcggcctctgtgattcacgaactcactgccatccccattcaggcgagtatttctaggtccaggcagggggacacacagagaaaccaaacagatgtggctcccaccctcaaggagtttccggtctactggggcgtgtaactagacaaggccaagcacaacactgtaagttcatgccataatgcggtgggcacagggccctgggtggcggagtgctgtgagaacacagtgggggacatgcagtgcaccgggcaggctctgcgaggaaagtcaggatgaaccaacacatgggacaatgagtggggctaagctaagagacagatgggagtggggtgggaaaagctggagaaaagagggacaagttcagagtaaccggtgcaggtacaaggtggggaattcaaggagacacctgaagctggatcctaaaagatttttttgttttttttttgagacagggtctcactctgtggcccaggctggagtgcagtggtgtgatcatggctcactggcagccttgacttcctgggctcaggtgatcctcccacctcagcctcccaagtagctgggactacaggtgcacaccactatgcctggctcatttttgtattttctggtagagacagggtcttgctatgttgcccaggctggctaaaaggtcctataagttatgtcagacagcacggacttcgtcctgaaggcaaagggaagccgtcagcagttttggcgctgggagtgacagaccatccagactgaacacttgaagcggtgcggagaactgaaaggcagggagactcgttagaagctgctgtagtaatccaggcaagaggtggcaaggaagggacatgttggagacgctgaggagatggagtcagcaggacctgatgggacacgaagggcaagtgagagtgttgcggggcggagtcagcgggacctgatgggacacgaagggcgagtgagagtattgcggggcggagtcagcgggacctgatgggacacgaagggcgagtgagagtgttgcggggcggagtcagcggggcctgatgcgataagaagggcgagtgagagtactgcaggggagctctgctttctgctttgggcagccagatggctgacacagtaaagcttctcttgtcaccatggggagaggtagtggtggcagtcactgctggccttttctttttcttttttttctttttttttttttgtaagagacaggcgggatctcattctgtggcccaggctggagtgcagtggcgtgaccatggcttactgcagccctgacctcttgggctcgggtgatccttccacctcagcctcctgagtagacaggactacagacactcgccaccacaccagcctaattttgtttattttttgtagagatggagtctcgctatgttgcccaggctggtctcaaactcctgacctcaagtgatccatccgtctcggcctcccaaagtgctgggattacaggcgtgagcccccgaagcacccggccaggttccatctttcatatgtagagacctcgtctctgtcagtttggttggaccaacttagtcttgaggaaacaattggtcccttctacctaaaataccaacttcaccatctcttttcaaaatcctctttaagaaatacaaataccagaggaggagcaaaacgagacatggagaaaaagtgtgctggtgaggagactgagtgatggtgaggttcctccccgctggacagcactgctctcctcgcaccccggcactgaggtcctggaccctctggcgaggagactgggtgacggtgaggagactgggtgatggtgagactcctccccgctggacagcgctgctctcctcgcaccccggtactgaggtcctggaccctctggcgaggagactgggtgatggtgaggttcctccccactgcacagcactgctctcctcgcaccctggcactgaggtcctggaccctctgacaccatcaaagtgacagaccacagtgaagtggggctttttccaaatgaaagtcaattgatttcagttcagtttagagactagaaattaagatccagctttcagtttcacagcagtgtggatggacttaaatgtcactgaactgtatacttaaaaatggttaaaatggtgaattttatgttacgtgtactttatcacaatttttaaaaagattcaggtttacctttaccagttctggatagcttctaaaactagcttggtttgacttccactcaagctgatgtataattaataccatcaacgccctttgggtctgctcacagtttgctgaaacattactgttttcgttagggatttagcaaatttgtgtagtttgatatggattccagtacacaaatcagttcaagcttcatttaaaaatgctgatgcctttgatccaaagagaggtaccaaaatttctctagcgatcgatttcacgatatcagaattaaaaaccctaccagcccagcaattctaggaattcaattttaggaatatttgctaaaaatctgcatatacaagtacatcagaagatctacacagaaggagttttactggattatgtaggcatctggaaatgactagaaatatgcgtcaagacaggagggttcaacaacctatagcacttctgtcccccatgatactgtgaatcctacacggacttcagagaccgaggcagacagaacaggctgggagaggaggccatgataagtaacaacaaaaaaggaatagtatattcccatctatataaatgtgagtataacatttatacagtcagtatataactattaattgttaggatataacaattagtataatcccatctatataaaacaataaaggaaataacactcattcacacacacacaaaagccagcatccggccccgctgctcatgccgcatacctctgcaggtggtagatcttgtgtgtgtactggcctttctcaccgtccttctcgtagggctcattcaccaggacctccacgccttcgccaccacccgtttcatttttactggcctcagccacagaatacagctgccccacttgatactaaaggacagagacagatgttattctcaacacggacccttctcaacggttacacgtaatccagctgccagtaagtgtctaactggatctccctggggtctcctcatgcaggagctggttctggagtttcacatcaggccttgcccaaacccacccaaagcaactgacagtgctgctccatggcccctcttgacccatcagacgtgtttagttcatccttctcattttcacaccacccatcagggtttatttttatttatttattttttttggtagagacagggtcttgctatgttgcccaggctggtctcaaaactcctggtctcaagccatcctcccaccttggcctgccaaagtgctgagattataagcatgagccaccgttcccagtcaatccatcaggatttaaagaggcaggtgagtctacttaacctgacaccaccacgcagaaaacagattagagtccaaaggagcttttgtgctaagcctgcttctggtattaagaccccagaagacctaggttggttgctagaaatcactggatctcacccatttaaatagatcctaagacttgatttcttgtcaaagaaaggtgctcagcgctctgtgaaatccgcaacctctatcgtaaaactggctcatctactcgcttcttctctagtcttaggcctctcctcaccccgcaagtagctctttcaggcaatgaaacctcttgacattttccagattcctggtggggccaagcaagtattcctgcttcccacatgagatattacagattcctgccccacagtctgtgccggctgggtgcaccctctgtgttggcacttactacatggcaaaaacctagttttcctttatttgggtcacatgccaccctatcaagtcaccagtcaacatgattggcctcctctgaccctgtcaggatgggccaatgacctaggcagtgcccagacttagcccttccgccttcttctctgagaagctgtccagaggagaaaacaaggtgaaaagaaaatgaacagcaacatttgaggcaggaaattatgtctacaccaacggatgtgtctttcctaccgctgccggtgctaatcaggcatggctgcttagggagtatgagaaaaaggaaaaaagctatgggattacccaacatgctggggggtggagggggacaaagggtttcctcgagctctatgcccaactcctggcacccccggggggaagacaagggtgtttctctatttttttttttttttttttttttttttagacagagatcgcacagtggtgcgatctcaggtcactgcaacctccgcctcctgggttcaagtgattctcctgcctcctgcctcctgcctcagcctccgaagtagctgggattacagggactgggtttttctctctttgagattaaaacagaaaggatgtatctctaggcaactgctacttaaatcactgcctccaacagcaaggacagaggcagcttccagagctgcttcgcctcaaacttagaaacctgctctaccaggcagcttcctaagcactgcagggaaatttctgggcaaaatctggaaagtgaagcagaggacgaggacaattcactgctcaccacaaggctgaaagagccctaactttcaaagcaaaatcccagaacaaaatgccatgaaaaggggcagcaatcgaggctcagtgaaatccatacagaggaacatatgggtgaaagccagtcaccttgaccttgctaatcctaagctgcatcagtgctgcctcaatgcccccctggagccccaagctgtccctgtgcctctccaagtccaccacccagctaggcacacatgaaaacccgtcaggtgggtcagggcttggctgagccaggggtgcctaagaaggagcagtaactccgtttcagagaagagccgtaagaacatctaaccactgactcagcaatcctaaaggacaggctggggagagggcctggtggagggggcgaggttcccagctagtggtaccacttgggaagggggaccccaggcagagactaatcgccttcatttggtttctcttcagctgcaggaatcagagggcaggttctaagaggatcagcctgttggctggcatcttcccccttcaatctctcttgatattctgatcctttaatcccaatgagacaagtgaaggcagttttgttaatctaaaggggtaagcaagactggcctgcacaagctacaagtgaagggcgcttttcacgttagagttccttttggcacagctgctctgccccctgggaaagcagccagactcggatggggcagagataggagtgggagggtcagatcattaaatcagatttaaaaaactccaacaggactgggaatctagcctcctcagacctgcgatgatgttccttgctcttgagatctgttcacctatcccagagaactaagacattcaactaagaaaaacagactccacaactttggcaatctgggagggggagcccagtgggtgggcctgaaatactgacatgaaacacgtcataaacaacagtacagctttggtcccaccaacatggccctgtcaggctgggtaccagagggggactggtgccgtgaatctctggaaacaagaagtgaagcagcccggccgacctgtgccaggaagcactggtggacacaccccgtcaaacagccagggctttctcgctctgctgcacaacgcccagacactcagggttagaccaaaggctctggccacccagaagctaattctgcccccaaaatattgatgcaggccatcggaatgattacaaaggcatgaccttctctttccctttcttcactttcccctaaatcagaaaactgcaaaggcctcaagtcatggcctccaatttaggaagtgaatccaccagtcacaagatgctgagctgttcccatagaaactgttaagtcaggatggggatggggttactgacaaagactctgagaaggttgatcatgaattgtttcttcttcggccttcccctccaagatttttctaattctctgaaactaagttccgcttcgaccctacccaggccacgtggtactttcttgtcaatggtttcttgctgagaacgggctgaccactgccaggcagacaggtgaatcctgatcagcactcacttcccaagcttctgcttagacttcaggctctgattactcaactccgccccaccacttcctcaatgctgcagaaaaaccatcacaagtgaacacccgccaactgtggatgctctcaaggtggaagttcccctttccttccagtcttggccccaccataagccatcagtgtctggcccttcagccttactccaagaacagccccaggtgctccaggacaggctggccctccttggtctgcagcacttctcagagacactctcgcccttcgttccatcaagaaactccctatcaaaggatccatttcacccctaatcaccacactaaggaaatcccgagttcctggggcacatcttcctaacgatcggggtgggatcatcctgtacagcagagaggacgtcactggacacctccccaagagctgagtttgagggcaagggacgcgctgggctttcctgcttggccttctggtttggaaaatcatcgcttgctattttcaataaagacagcacaggctgggtgaagtggttgacatctgtaatcccagcactctgggaggctgaggcaggaggactacttgaggcaagaccagcgtggacaacagagtgagaccctatctccactatttaaaataaatattataaaataaaaaaaataaagacagcatggccaaagcaggtgggttaacaagacccttccaagccaacacctgtcagcccaggcacctggttctcaggccccaggtacatccccagtgcctacagggattagagccatctacccagccattccctcattctccctggttcccaggttccccagtctcgtttctcttttctgcccttcccagaaccccaagatcacggtcaaggcccacctctggccccctccccaggtccccacagctcttatcagatatgtagcccacccctggaggcagtcctctaaagggccagtgtctgcccacccctctcgggggccaacaagcctggatgtctgtctcaactaaatgtgctgcaggctctgctggcctgatttcatttttcaaaggtgcagttcatattgggaacagagtggaagttatcacaggagcttcatgctgacactgcaggaaagagagacggagcccagtgactggaggcactatactggctgacgaacctcacccaaactcgagtttaactggaagctggggcggggtggggctgtgatttcagaaggaagcaaagaacaaggctgcgccaggagaggagagtggaagaagttcagagaaagagtgagacaagggaggttccgtgacagttttccgttgtccaagagactgactctgagtcagcatggcctatgaaccttcttacagcaaatcctgctgccagatccccacatacaaggatgtcagacccaggaaccgtaaaaggacagaggacaagccaagcctatgtgttattccctgcccttcgtaaaaggagggttctgtgtcttggtctttccagcagtcacctatcgtggctagggagagcctcaagagatttcctgccctgctggtttgttgcacaaccagaaagagccacgcacacttgccagccgagtcacggacgtcccagaaatgcacacacttgatcccatcaataatgcgtccccggccgggtgtgggggctcacgcctgtcatcccagcactttgggaggctgaggcgggcggatcacttgaggtcgggagtttgagaccagcctggccaacatggtgaaagcccatctctactaaagatataaaaattagccgggtgtggtggcacacacctgtaatcccggctacttgggaggctgaggcaggagaatagcttgaacccacgaggcagaggttgcagtgagcggagatcgcaccactgcactccagcctgggaaactgagcaagactccgtctcaaaaaaaaaaaaaaaaaagggtccccagacatgcacagccccagcagataaaaggggctggtttaatctctactcatccagcataccaacagcttgggacaggttgcacacagttacccagatatacaaagtaagtgccatttttcaactgaaagtggcaccacgaaattcacattgaaatatttatgttagaacaaataagaaaactatataaacaggataaccactcagagcccagcttagccaatggtcacaaacagttacacacaactatggaccagaaagtaaaaggacttacctcatctacagacacaggcaggattactcgactataagaaagggaaaagagagtatcaactttaggctgtgcaatctgctcaaggctctttaaagcatcatcctaaaacagtcagcagcattctattgtgtaagacactaaattcagtgacgaaaaccccacagagaatggccctttgagtgctctgaggacaggaccctctgtgccctagaggtgtaagacactaaactctgtgacaacaccccccccccgcccccccccccagagaatggccctcttagtgctctgaggacaggaccctctgtaccttgaggcatcccagttagaaccctgtgattcagtccaaacctatcctcccgccagctacttcccaggcctccacctcacattcggaactggacatatggatgataaacttcacccaaacttgccaatgagtcgtccccccaacaagacttgccagtgagtctagtaagacaggttaacacaggaggacctatcatggtgaggattcagacccaaacaagaggccctggggacttaaatttctgtggacccaacctcccaacaacagccctccaggggaagggccaggaagggaccaagccccttgaagcctaagaacacacaccgggcatctctgctcggggctggatattacaatccaagctgctaccacaaagccaccaagagggcattcaacttatgtcctgacctccaggagctgtccaaaggaatcccaatttatcattttcttttcttcttctccaactcaatgaccaccaattgctggagatgccaccagcaacctattggagaagccgtggccggcaaagtctccgccagggccagaaccccacagaggtgccagggctagcagcacttctccaggtgccgtgcatgtgaaatgcagaccaagagccacccccagttcaaagctgtgaggcgggagagctaagacaaaaactcttggttttacccatacaagtccagccagtttccaagcttagacgttcggtccccagacccttgctggagccctctgggtccttttgtgtcttgcatgtttagtgaagcattagggaagcatgagctgctgtgccttccttatgcagccggctcaccactcaggctccttgctccaggctagtaaacagctattttctagttccacaaaggtcccccaggaagcaagaaggacacagaggggtctgaggaaaacatcacctcaaaggcaagacaccaagcaggaaagtagcaggaaaaacaaaatgggctccaagtctttactgcctgctaacaactcccttcctccagagcaactcaaacaacataaatcctccagtttactgaatgctgccagtgagcctcccctcccattacagaaagccagtggtgcagaaaaatactcccaacttggaggccagaatttctgcaccctcagaagaaacttcctagaaaacaataagccttttatcttcaagaacagcagtcaaaatcacatccaagattttgcagaaatcaaattaaacagaatcctgttagaggaagtgttggaaaaatcaacaggggcaacctgcagacgctgggtgggaaccaagtctcaccccaaaagagaatgccatgggccaattcctgacgggatgcgctgaggctgctgacgtgacggctgcacactctgacactgcccccttgctccttaggaacaaaaccacttcggcagcaatagggtacaattccaaaggacagggccacagaggaactgccgggctgggcctggagcggcactcactctaatgtgaccttcactcgcaccctttccagggctgcaacgctgcggccacagccagtgtctcggatgccctgatgcccctgctcctcccccgtcccccgcccagggatgcacacacggggcacgagtcgggcaggaaggaaacgcagataccaggcaggccctgcatctccggcaccttggacttttcccttgcaggcttcaaggggaggagaacaaagacagggaaggagtgcctctcttcaaacctcactcagatctcctctgaaggtcccttcctttccctgcctgaccttcatttcaaaaccacagatttctacagattctagggttcatttgggaacaggaaaaagaatcagaaggatgggaaaagcctgtcagtctggacactgaagattaaaatctaaagtgcaccacgttctcctgttggcatcgtaaagttcttcctcctcaccaggaaaagctccgagccctggctgaattaacatcagactggatgtcaagaaacagaggggatgaggcctcaaaataatgctcttcagatgaggtgtttagctgggatgacatgtgggtctcagctccctctgttacccaaactccactctatgtcctaaatgtcctaagcacctccaaggagccagcctggtggggatggtcaaagtgcgatcgctgacaaagtggcaagagctctctgcacacctgcctggctgcctcacaagttgctctctgtttgaccatctcccactcctggggcttctggccctccctccaggaaagcagtttcactgtaaattctgtgcacacacgcacacgcacacacacacacacacccatcctatctctcctctttggggagaaaaatgtcctgtgatgcttacttggaaccctgagcttcaacgatggctcatcttgtacttgaaagatttagcacaccaaacatctccacctgtcccccagtcccctggatttcaggagcaaacccgtcatcctgcaactccttccagaagtcaccagtttcccacgcacccctcttcactactcaagagctccccaccccttccaccatctctcctcagttcacggctccatggacccctcaattcctcaaagaatttccccatctctttgcaccaagactgagaatcccctagaaacaagctggccctgccctggtctcccccatctccaacggcaggtatactcatcccaacatactctctttccggaccagcctcgaccccggtaacttcccggccttctccacttcggaccctacccaacattttctggcctcctcgcccaagtctccccacgtcccaagcagtcatcccaagcttgttccaaaagcctcctcttccgcaccagctgcttgggcaccacggttactccggcccgcatctcagccccctctgcatgtcctcagacccttcacctgtctccccagccaggccctgacttcctagtcctcctcctgtgtccacttaccaccacccctcacccgatgcctaaggcggccactcctccccatccccatcccaactccatcgcggagcctctgacccatccacccggctctccgtgtgaactgttcggccctccacctttccccaccgccgggaggccctgcctgccccggtgcgcctcttcctcggccgccgcggggcctctcagcgccgcctgcagtcccggctgagcccgcgccctcggcccgcgcagagcgaccccacagcactcccagcgctcggcgtcccctcggcctcccccagtcccgggccagctctccctgccctgaccccgtctcgggcctggcctcgccctcgctgtccccggcctctcctcgggtccacttgggcctccgaggcccccggggcgcctgaggagccgtccgcccgggttgtccctccgtgcccgtgggcccctccatgccccggctgcccgtccatgccccgtgggccccggctcagatgccgaacgccccggctgcccctccacgccccggccgcccctccacgccccggccgcccctccgtgccccgtgggccccgcctcacgtgccgcccgccccggatcccctccatccccgctgggcccgcctcaggcaccctccgtccctgctgcccctccgtccatccgggccctgcgtccctcgccgcgccgtcgccccggcggccgtccccaccctccctcctccccgcttccgcacggccgccggacactcactactccttgagcagcaccatgtcgcttcgcggctcggtggctgcccgcggcccgcccggcctcccgcccgctgcccgccggccgctctccccgtggcccggcccggcccggctgcctgtgcgtcttcgtcgtgctctgctccgtccccgccgccctcgccgcggtcgccgcgccggctcctgccgcccgggcctcgtcgcctctcgcgccgctgccgacgccgcccggagctccggttccgcagcgccgcgcgggggcggggcgtctctgcggcaaccagagcgtcacacgccgcggtgcgcgctgacgtcacgcggggccgagccttcccaggcccgccctcccgtccttaagtgggccgcggcggcgctgtcggttccgaggtggggccccgcggctggggccagacccggcagaaggcggagcagactagggtgtccgtcaccgtcctcggtgtgaaccgccacggatgcacgcgggtgctggctggggggcctccccggttgagggaattgagacccaggaaaaggttgtttcaaaaaatattaatagccgcgcgcggtggcccacgcctgtaatccttgcaccttgggaggccgaggcgggcggatcacctgaggtcaggagttcgagaccagcctggccaacatgatgaaaccccgtctctactaaaaatacaaaaattagctgggcgtggaggcacgcacctgtaatcccagctacacgggaggctgaggcgggagaatcgcttgtaccgggaggcagagtttgcagtgagccgagatcgcgatcgcgccattgcactccagcctgggggacaagagtgaaacttcgtctcaaaaaaaaaaaaaagaaaagaaaagggctgtgaggccgggcgcggtggctcctggcagtaatcccaggcacatcatgcctgtaatgcagcactcaggcgggcgcatcacctgaggtcaggagttccagaccagatggcgaaaccccatctctactaaaagtacaaaaattagccgggcgtggtggtggacgtggtggtggtagtcccagctgctcgggaggatgaggcaggagaatcgcttgaaccctggaggcggaggttgcagtgagccgagatcgcaccattgcactccagctggggcgacagagcgagactctgcatcaaaaaaaaaaaaaaaaaaaagaatgaaaagggctgtgagaaatgagacacaggcttagcggcattacacggaggggcacctaattgagcgtcagggatgtagtcagggaaggcttcctggaggaagagattctcagatctgcagagggcttcggagaagagcatagcaggcagagtgaatgcaaaggctggaggcaagagggagagcatggtgcatttggagaactgacaagtgagtggaacagaacatttcagggctgagcagctcaataggggagggttcctggtgaacgatgataaggtatttggagtccaccctaagggcggtgggagggcatgtaagggctctgagcagtgacatgagcgggtgtcctgggcgaaggctcactctagtggttgggtggacagaggggatggaatgccagagcgtaggcagggagaccggcgaggaggctgctgcagatgtccaggtgcaggtggactaggacagtgggagggaagaaaaggaagggatggattcaggagcaactcagaaggtaaactccgtgagacttgttgactcattggctgagaggaggagagaaaagcagcgaggtctctggcctgggagccggggtggacggtactgtcttctctgagaacacaggcaagacaggctggcatgggggcaggtaatgactccagtgctggactcacactcagcgcaggacgctagaggggcatccaggggagatgggagtgggctgcctaagacagggacttgggaagggagggtggagcagctggccgtgttgctatcaggatgtgactggcggcccgcgactgccctgagcactgtgctcacttatcagatcctagagtgggggccaggctgagtgcctcacacctggattcccagcactttgggaggctggggcgggcgaatcacttgaggccaggagttcaagaccagcctggccaacatggtaaaaccccatctctactaaaacaaaaattagctcagtgtggtggcatgtgcctgtcgtctcagttactcgggaggctgaggtaggagaatcgcttgagccctggaggcagaggttgcagtgagccgagatcatgccaccgcactccagcctgggcgacagagcaagattctgtctcaaaaaaacaagccgaccactattcacaatagcaaagacttggaaccaacccaaatgcccatcaatgacagactggataaagaaaatgtggcacagccgggcgcggtggctcactcctataatcctaccactttgggaggctgaggcgggcggatcatcaggtcaagagatcaagaccatcctggctgaaatggtgaaaccctgtctctactaaaaatacaaaaattagctgggtgtggtggcacgcgcctgtagtcccagctactcgggaggctgaggcaggaggatcacttgaatgcaggaggatcacttgaattcaggaggcagaggttgcagcgagccaagatcgtgtcactgcgctccagcctggcgagagttagactctgtctcaaaaaaaaaaaagtctcagataatgtggcacatatacaccatggaatactatgcagccataaaaaaggatgagttaatatcctttgtaaggacatggatgaatctggaaaccatcattctcagcaaactatagcaaggacagaaaaccaaacactgcatgttctcattcataggtgggaattgaacaatgagaatacttagacacaggaaggggaacatcacactctggggcctgttgtgggacggggggagggggagggatagcattaggagatattcctaatgtaaatgactagttaatgggtgcagcacaccaacatggcacatgtatacatatgtaacaagcctgcacgttgtgcacatgtaccctagaacttaagtataataagaaaataaaattaaatttaaattaaaataaaaaaaaacaagccgaccttggacatcatgtcatctcacccctccaggttacagtgcacattctagaaatatgcacatttcttacaaatgcataatgccattgtcatacttaacaaaattaataatgatttcctgatgctatctcatccccagttcatattctaatttccctgctaatctaaaaaatgctatagtttcctttagagaagttcagtatccaggcaaggtccatgtatttttttttttcacactttattttgagttacgttttttacatctttttcaatagcaagtttgctgcagatgtccatacgggttagacgcaggggtcacaccactctccagctgtgccacactgtgagccaacagccccacccaggacacagacttccgctgccttggagtcccaggcctccacttcctacctctgtgaccttgtgcaagtgacttaacctctctgtatctcagtttcttcacttgggaaatagggaacatgccggtacctgcgtcatggggctgctgagcctccttggatgaggcaatggacatgaagcagctttctgcagtgagtggcatatttccttattattattattattattattattattaattattgggaaaagggcgttgtgaacaaggagggatggacacccctgcccctcaaaactacctctaggctggtcacggtgccgcacacctgtaatcccagcactttgggaggccgaggtgtgtggatcacctgagatcaggagttcgagaccagcctggccaacatggtgaaaccccgtttctactaaaaatacacaaattagccaggcgtggaggtgtgcgccagtagtcccagctcctcgggaggctgaggcagaagaatcatttgaacctgtgaggcagaggttgcagtgagccgagatagagcaagactctgtatcaaaaacaaaacaaaacaaaaaacctacttctgcatttctgcatgctccaggcttaacagaggaaagaaacgagcagctttccatggatctctctctctttgccttgctccctctgtccgtcctctctcagtttctcaagctccctctctcttcctgtttctcctgtccctttcgtatctctctgtctctcacttgtgtctctctggctctcccaggctgtctctctctggacctctgtcaccctgtctcattctctctctgttctctgtccctcccttcacatctctgtctccctttatgactgtcgtctcacttctctgggctctctgcatttctgcctcacctttacctcgcttcctgtctctcctctttgggcctttcccttcccctctctcccacttcctgtggtctcagtctttgtttttttttttttttttattattattttttgagacagaatcttgctgtgtcaccaggctcgagtgcagtggcgatctcggctcactgcaagctccgactcccttgttcaagctattctcctgcctcagccacccgagtagctgggattacaggcgcatgccaccacgcctggctaatttttgcatttttagtagagacgggatttcaccgtgttggccaggatggtctcgatctcctgacctcgtgatccgcctgcctcggcctcccaaagtgctgggattacaggtgtaagccaccgcgcccagcccttgttttgtttttcttctcttttttgagacagagtgttgctctgtcgcccaggctggagtgcagtggcatgatctcggctcactgcaagctccatctctcggggctcaagcgattctcctgcttcagcctcccgagtagctgggattacaggagcccgccaccacgcccggctaatttttgtatttttagtagagacggggtttcaccatgttagccaggatggtctcgatctcctgacctcgtgatctgctcgcctcagcctcccaaagtgctgggattacaggcgtgagccactgcgcctggccaatttttttttttttttttttttttaagagacaagctctcattatgttgcccaggctggtttcaaactcctgggctcaaacgatcctcctggctgggcctcccgaattgctgggattatagatgtgaaccacaagaccccatgtttcatcgtctctttgcggctatctcctttcccctgtgtctgctgtgttctatcacagtctatttctctctctcactccttcgtctttttgttttgttttgttttttctttttttttttttgagatggagtttcactcttgttgcccgggctggagtgcaatggtgccatctcagcccactgcaaactctgccttccaggttcaagcaattctcttgcctcagcctcccgagtaactgggattacaggtgcccgccaccacgcccggataattttttgcccttttagtaaagatggggtttcaccatgttggccaggctggtctccaactcctaggctccagcgatccacctgcctcagcctcccaaagtgccaggattacaggcatgagccacggcacccggccactctttcatcattgtgtctgtggatctcacggttccagttctcagcatggtttcccctgggtggttgacccttggtactgcgtcggttatagccagccctgtaacccatctctgggtgtcctggggagactgtatttcactgtttccatcttccgctctgctcttctcccagcctcttagtctattttagcttcttttctgtggtatttctgtctctctctctttttaaacttcgtcccccaaatatttattgagcagctattccatgccaggcacgattctaggcactgggggtagagtggggaccaaggcagagcatgcgccagccttcaaagaatgtttttttctttcttttctttttttttttttgagacggagtctcgctctgttgcccaggctggagcgcagtggtataatctccgctcactgcaagctccgcctcccgggttcacgccattctcctgcctcagcctcccgagtagctgggagtacaggcacccgtcaccacgcccggctacttttttgtatttttagtagagacggggtttcaccgtgttagccaggattgtcttgatctcctgagctcgtgatctgcccgcctcggccttccaaagtgctgggattacaggcgtgagccaccgcacctggacattttttgtagttttagtagagacagggtttcaccatgttagccaggatggtctcgatctcctgacctcgtgatctgcccgcctcggcctcccaaagtgctggaaatgctcgccaccacgcctggctactttttgtatttttagaagagacagggtttcaccatgttggtcaggctagtctcgaactcctgacttcaggtgatccgagggggcttcctttataagcagaattcaccagcagccttggtcttcccacccaaaaggcctgttgctctgccctcccacactccttcaaatggcaatgcagatcaaccagcaaatgcagcctggcaggggtgggggtcaggaacgcatcccagtcaagggacagggaacctgggcaccagacaagaggcgagaaatgtgtgatctagggagaaagagacacaggagccaaggaggaagccgctcgcagtcattctcagcatacatttattgagtgctcactgtgtgccaggaagtaagccaggtgctagaaacggcaaaggagcagggaagaggcgggtcagccgctgggttgaccctggttaatacagggtacggattaacccttcaggctcccttccgagggcctgggcggggtcttggggccgctcctgcccaggtgttctttccagcaatggaaagggattcagcgaggtaagacgcttcccctctcctccattcagagagcggcacacaagaaatctacacagtcttcccaacatgtacacaccctgacatgcccggatgcatctcacacttagataaacacacacgcacacagtcagaggcacggtcccgcagctgtatgaggatgcggtgtacaggtgctgcctacgtgaccgtgccttgagtcgccccactcagcagaaacctcactcagcagaaacttgtccaccagtgattgattatctcgagcagctatttggccaagtcttaccaaaacgtgaaagccacaaaagaaaagtgaacgagagaagagtttcttaaggctttgctcggagagggcttcggagaagggtggggtcagcagatacagaccttactttttttttttttttttttttttttgagacggagtcttgctctgtcgcccaggctggagtgcagtggcacaatctcggctcactgcaagcttcacctcccgggttcatgccattctcctgcctcagcctcccaagtagctgggactacaggtacccaccaccacgcccagctaatttttttttttcgtatttttagtagagatggggtttcactgtgttagccacgttggtctcgatctcctgaccttgtgatccgcccgcctcagcctcccaaagtgctgggattacaggcgtgagccactgcgcccggccctaatttttgtatttttagtagagttgaggtttcaccatgttggtcaggctggtctcaaacccctgacctcaagtgatccaccccgcccccgcttcggcctcccaaagcactgggattacagggatgagccacctcgctgggaccagaccttactttcttgacttggccacaagtctgtcctgctcagagctgctgaaagtggctctcctgttgtatgggcttgggtgtggtgtggtggccctttccctgtcccagctgccttcttcctgggcactgaaaacgatgctaccattgtttttttttttttttttgagacggagtctcgctctgtcgcccaggctggagtgcagtggcgggatctcggctcactgcaagctccgcctcccgggttcacaccattctcctgcctcagcctcccaagtagctgggactacaggcgcccgccactacgcccggctaattttttgtatttttagtagagacggggtttcaccgttttagccgggatggtcttgatctcctgacctcgtgatccgcccgcctcggcctcccaaagtgctgggattacaggcgtgagccaccgcgcccggccaaatgctaccattgttaagtgccaggcgtcccaccatgcgggtcttcactgcgtatccacgtagctgcaccacgcaggcattctttcctcccttttgcagatgatggcaccaaagttcaagactcgcccagggccaccaagacagtcctctagactttggtcttccctccttgcctcctcggcctggggtggtggcgcctcggtctgagaagggtcgaggtctgggtgctgctagtggccctggctcagtctcagagctgcccggagggggtgaggatggctaacttaaggagcacaggcagaggcttcctgctggcaggaagagggctgagctgcggaaggccacccaggtggagtgtgctgcacctccttcagtggccttcaggagctctgtcctcacccagggattggggtgagtcagggcatggggaaacaggctcacagagcccacctgctcaccctgaccaccccaccccaggggaccccaggctcctaactctcagaatcccacagtctgtattggcggaagacgggctggcacccttgagttaggcccccagtcgttggcacagataaggggagctgctgctgaaggagcccgacggctgattctgtggaggcttctcagagctcctggcaggagcccctcaccgcaggaggcccacaacccctcccagctgcatatcggctcacattcacgcggctgccacacaagtgcgtcggaaactccacttggctgaacgtgattgtgctgctgtctgggacagtcttatgcacgtgagcccaatactggatgtcccgccattttcagccctggggcctatggcaaagtgacgcccccctcggagtgcacggcaggcaaggaaggtttaaacggaagttctgaccaggacgatgctgggtgcaagaggggacggggatggagcaaaacagaaaggatccaccagggcctgcaaccacgtctttggccccggtgaggggtgggaccttgtgtataggtccaggcagcagcagctgcagacagaggcctagagggtttggagaaggccgaccacaaagacacgcctagaccccagagtctagtgaggagagggactgggggcagtgtttcggcagcagacccagacccagactcagacccaagcccccctcctcactgatcaaaaccccaagggcagggagcccttcctgctccttcccgccagagcctggaggatgaggggcagacgggaggcccggccactggtgcctgctcctttgatcagctgtagtcccttccccttcacagggcacttgtcttgctggttggggtcaccagggattgctcccccaagtacccatcagcctccagggcccaaatgattccatgcagtagctctctccccctcttctgagaaggctcttggctcccagaaacggaaaccatgcctgggcctgctccccttccttgggctgtgacccccctgccacagaggccccccccccgccacagaggtcccccctgccacagaggtccccctgccacagaggcctggtggcccctgagctgctgctccgagtggaatgtcctggtctagaggcccttggctgctccagtgtcttaagacccatatatgagtgctggctctgaccttgaacaagctcctccatcgctccaggcctcgtttttcaggtgtatatgatgatagtatctctaggcctcgtttttcagttgtaaagcagggatgatcatatgtgtttaactcccagattgttatcaagtcaaggacaacaataggaaaacatgtcacctgtcagctccacacaaggcaaagtaggatgggtgacccctgactagggggtgggagtgcagggggcacccgacccatctggccagccacagcctctgtaccctgctcgcattttcaggcctcaatccccaagcactgttggccctggactgtttccccccctcaattctgtttctcaatgcctgcttcttcccagtaagtgccacaccctgagggtgggtgggagagtgaggcagcactgcccactttggctgggactgggcactgctggggacagcacgggccacgtcttccccatctcaagactggctttttggctaggcattgtgactcacgcctgtaatctcagcactttgggaggctgaggtgggagaattgcttcagcccaggagttccagaccagcctgggcaaaatagcaagaattcatctttatgaaaaagaaaaaaaaaattagccaggcatggtggcacacacttatagtcccagatacttaggaggccgaggtgggaggatcccttgagcccatgagttggaggccgtggtgagctatcagttgcaccactgcactccagcctggatggcagagcaagaccccaactcaaaaaaaaaaaaaaaaaaaaaaaggcggccttttcccagctggcagcaccctggctagttagggtttctccgaatctgcaactcctgtgtgatggcgggtctcaaatgctggcagcagagtcaccggtcagcggcaagacctggagtctccatttggaaccagcacccgggagcctctgctgggggtgatcatggagccgcacgtggaggctggtggctctgatggttcgagccgttcctcggcagcacagcacacccgctcctgaggagccacggagctcatgagcgttggcaaagtgctgtcagtgctggctgtaaggaaacaggcttgacttttaactcagcctttcccaaacttgactataatactttcttgaaaatcagaataaccactaacatcacaaaacgagtgttctcaggagtgggcatgtttatctcgttctctttttttttttctttttgagacggagcctcgctctgttgcccaggctggagtgcaatggtgcgatctcgactcacggcaatctccgtctccccggttcaagcgattctcctgcctcaggctcccgagtagttgggattacaggcgcacgccaccacgcccgattaatgtttatttttagtacagacggggtttctccatgttggtcaggatggtctcgaactcctgacctcaggtgagcctcctgccttggcctcccaaagtgctgggattataggcgtgagccaccacgcccagtctttttttaaatatttgagtgaaataaagcctaggagatatgtgttccaggcgcccaagctgttaatgtggagcttgaatgtggcctggacctgccctttcctcttctcctttcatccccctccctgccgcccacatcctgaactgctctgagcctgcagaagaacccagcgggaatcttcagggttgtggaagggtgtagggatggaaagggaccaggattcgcctgtttggctgggaaaatcggtagaggagggtggctcacacttctaagatgtctgcacaagcccagtttgtttgggggttggggaggaaggtcttttcctggcccactgtccctcccgagtcagcagtcccccagagagacgaagagcagctgggcacggctggagctggtcggtggcagagaatcttgtcctgccttttcttctcaagctcaaaataggcacatgcagctattaactgatatgccagaaggggcatcccttacccggaggaaaatggatttattgctttataaaaaagaagtctaataaaactgaagagaaaataactaaaaatccaaacacaactcacccctctaagcacgcccaggaggtctcaagacacacttctgggggcagtcaaggtgggcgggttggtgggccaggcggacgggcctcccccgtcatcagctccagggccccacggagcccgccggcagggggtgctgtgggcctgtggccttggacaagctcctggccccacgccaggatggctcctgggcactggcccagctgcaggcctggcggctcccgcctggtcagtggggataagggctaactcctagagcccaccccgaccccacacacacctcggacccacccacgtccccaccccggcctggacctccacgtctgccggccacagcctttcgtccacctccacaaaagcagctgtgtgtatgtacggggtgccctggcggcggtcctcaaattcccttcaggtggcagacagaacgagggtgacagtgaaaacgtgtccgcggcattggccctcggggaggaggcgaggggtccacccagcccgctaaaccctctccagggcataagccaggtggggcttctccaccggcctccaacgggtgggcaggccctggacaggcgacagggggctggaattacaaaggaattagcaccgacaacaggaagcgggtccttccttcctcaggcagcctcaggctggccggggagggggtgggggccaggcgcgggcgagacagtgcaagcctttgtcctcaggcaggtacggctgtgggcatgcagccgaggggcaggtggcaggcaggggatggcagccccctctgctttggcaagaggcagaatccagacactggcgggagagcgcctgcctgccgggcgttcctggctcctgctgcaggcaccacagagaccccaggccccgggtccccggggggcggcagagcaaagtcagggcagcccctgcgttcggcaggagaaaacgcgcgtgtccggggccctctcccgtccttccaccacagagctccgaggcagggccccgggagggagcgtgaacgctggcacggagacggcgaaggtcctgggggtgcgtggggtactctggaggggcaggacaggggtcagtcactgaagcacaggcaggagaccgcagttccgaggcggcagccactacacgaaggcctcctggttggacgagccgttgattttgaggaagagtttgtcatcctcctgcctctgctgcagctgccgctccagctggcgccggtagcagatcaggtagagcgggaggcagaagcccagcaggctgagaaggagcagccccacgttcacctggggaggcagggaggccgcgcatcacagggcgtggtggtgcgccgaggctgcagacccgccctccactcgggtttgggaaaggggagaaggtcacggggtggaagggggaacgaaacaggaaggcccacgaggtcccatatgccagcgtcccggttcccaactcttcacaggccatgtggccaccctcagggcctgggcccccaggaaacacgggctgatctgaacctctgggcttggaacaagttcctggtacctggtgaggaaatctggccctcggaggtggggcggggacaggaactgtgttctttttttttttttttttttttttttgagacgaagtctcgcgctgtcgtcattcaggctggagtgcagtggcgcaatctcagctcactgcaatctccgcctcccgggttcaagtgattctcctgtctcagcctcccgagtatctgggattacaggcacctgccaccacacctggctaatttttgtatttttagtagagacctggtttcaccatgttggccaggctggtcttgaactcctgacctcaagtgatgctcccgcctcggcctctcaaagtgctgggattacaggtgtgagccaccgcgcccggcccaggaactctgttctatttctccccaaatcaggtccagagaggacatgttccttttcctgcctagccaccattcacaaagggactcttaaccaatcctaaccaacgctcccacatgtcctcggggccctgaagcccccgagggggaccttgcagctcgcagttagcagaagggggcaggcgcccatgacccaccatcccccgacccctcttacccacagagggtctccctggagaggacccatcatggccagaaacagcggctgctgcagaagggcgaagagcgcgctgatcagagactgcagtcccgtgaggctgccgaactgggtggaggggtacctgcagggcaagcgacagctcacagccatcctgcctcctgggctttgcttggccccaggtgtctggtgaccccgggctgcaccgttggtgccagagaagggtggggtgccagccctcggattccttcctgctgggcagttctgtttttttttttttttttttaagatggagtcttgcactgtcgcctgggctggagtgcaatgacacgatctcggctcactgcaacctccgcctccccagtccaaacaattctcctgcctcagcctccctagtagctgggattacaggcgcccgccaccacatctggctaattttttgtatttttagtagagacggggtttcactacgttggccaggctggtctcaaactcctgaccttgtgatctgcctgcctcggcctcccaaagttctgggattacaggcgtgagccaccgcgcccggccctgctgggtggttctgcaaagtgtttctctttggaccagctccaggccccagactctggggagggcccaccccactcagctgtgcccagggcctgtgggtgtctggctgagccgagtggaaagcgtggtgccagcggggacctgcggtttgggaaacaggcccagagaggagtgtggaggctgggcttggctctgcagtgccctcgtccagagaagcattgagtaatcgcggaaactcagcaccacagatcccgcccccctccctcagaccctgccaggacagccacagcttcctccaggcctggggaggggcaggcggagggcaagcggagctgggattaccccaggggctgttgcgggaattgggagagagttccgggctaaatcttagcacatgtcaggctctgctggcccagaggtgggaaaggaatcccagcaacacatgagctggtcccacatcagagactgtggatgatgatgtttgagtttcagtttttgggtcaaggcctgagccagagaagaaggaaccactgtggttccttttatgtttctggggcttcttggaaaaagatacaggtttcattttagccagggctggagaaagctatggccagagctgggcgcactgaggctctggatgggcccgtctggtgtattctggactcagtcacccatgttgctgcccgtgatgagggcaactggaacttccgcatttagcttcaggcagccagaacctacccatccttcccagtgagcagccagggccagccccaggactcggctgtagtggcccctgaggccataatgagctgcacaggtgcctgaccctggctgggggaactgacttcgtgttgaatgccaaggcttgtgagcacccaactgtctgcccactgacctgcttcccacgaggtatggcctttccctgaaacacccagcagaaaccctggtacctgtcccctgaagcaggaagatgagcccttctgggacaggctgaccctgcctcagagtctcagtcccaccagcaacctccccccggccattcccacaccctcgcccaccaggccacctgcggcttccaggacttacacggcagcgtacaggcccccgacagcggagtggatgaatcctcgcacgattgtgtgcaggatgaaggagaggatctgggggaggaaaaggcgactgtgggcataaggccttaagggaccgtcccctcagcccccgccctccaattcctgggggccctcaccccaggggcagtgtcagcctggagttggatcaaccccatcctccggagccaattgtgaattttcagaaattttgcaagccagtcgttaacacagtcattttttgtttgtttgtttgttttgttttttgttttgtttgagaagaagtcttgctttgtcgcccaggctggagtgcagtggcgtgatcttggctcactgcaagcttcgcctcctggattcaagcaattctcctgcctcagccttcggagtagctaggattacaggcccacgccaccatgcccggctaatttttgtattttttaagcagagatggggtttcaccatgttggcccggctggtctcaaactcatgacgttgtgatccacccgcctcagcctcccaaaatgatgggattacaggcatgagccactgcgcccagcctaaccgagtcattattaaaaattaaattataggctgggcaaggtggctcacgcccgtaatcccagtgctttgggaggccgaggaggtggatcacctgaggtcaggagttcgaaaccagcctggccaacatggcgaaaccctgtctttactaaaaatacaaaaaattagctgggcgtggtggtgggcacctgtaatctcagctgcttgggaagttgaggcaggagaatcgcttgaaccaagaggtggaggttgcagtgagctgagatcacggcattgcactccagcctggtgacaaagtgagactctgtctcaaaaaaaaaaaataataataataataataattaaattataagccgagaatggtggctcacacctgtagtcccagcactttgggaggctgaggtgggtggatcatatgaggtcaggagtttgagatcagcctggccaacacagtgaaaccccatctttactaaaaatacaaaaattagccgggtgtggtggcgggcgcctgtattcccagctactcaggagggtgaggcaggagaatcgcttgaaccggggaggcggaggttgcggtgagccgagatagcaccactgcactccagcctgggtgacagagctagactctgtctcaaaaaaaaaaaaattacataaatttatgactaaataaataaattatattaaagtaaaggtaatgaatactcaaaactctgaaaactcatcacttcctggcctggtgcagtggctcacacctgtaatccccacactctgggaggcctgggaggatcacttgagcccaggagttccagaccagcctgggcaacatgtcaagaccccatctctgcaaaaaaatataaaaattaactgggcttggtggtacgtgcccgtagtcccagctactcaggaggctgaggtgggaggatcacctgagctcgggaagtcaaggctgcagtgagccaagatcccaccactgcactcgagcctggctgatgggagtgagaccctgtctcaaaaaaaaacaaaatgaacgaacaaaaccatggaaaacctcatcccttcctaattattttacttggttcactagagcctgtgcacgcatcaggctttcctttttttttttttggagacagagtcttgctgtgtagcccaggctggaatgcagtggcacggctcactgcaagctccgcctcctggattcaagcaattctcctgcctcagcctccctagtagctgggattacaggtgcatgccaccaagcccggctaatttttgtattttttgtagagacggggtttcactaggctggtctcgaactcctgacctcaggtgatccacccgcgttggcctcccaaagtgctgggattacaggcgtgagccaccgtgcccggccaggcttttcacatctactgtagaaataccacgtgtcactgtgactctccagttccacagtcagtggcaacacatgggcagctggaaatcagccacggtgagtgcatgtgcaccgtggaagtcggcaaacactagaaccagggccctgctgacagacgtgtatgggcacagcactgagcaagaggttgctgaccacggcctcgagctgcctttgcccacctcggactgtgctccagggtctcccaagcctggtcacccggccctcccagcaggtggctgccctctcacctccctcgtgaagtgtttcttcgctttttgttttgttttctttttgtggtttgttctgttttgtttggttttgttttgggacggtctcgctctacaccccaggctggagtgcagtggtgtggtctcggctcactgcaacctctgtctcctgggttcaagcgattgttctccctcagcctcctgagtagctgggattacaggcatgtgccaccaggcccggctaatttttttttttttttttttgagacaaggtctcactccggttgcccaggctggagtgcactggtgcaatctcagttcactgcagcctcaacttcccggggtgcagtgagccgagattctcccacctcagcctcctgagtagctgggactacaggtgcactccacaacacctggctaatttttatttttagtagagacagggtgtcgccatattgcccaggctggtcctagtaaagttctgtcgctgtctgtgggaggccccctgcccaggaaggctgctgctggcggactccgccaactccgagaggcactttttaagagccatcctcttggccaccaggtccctgtggtcgccttgtcttctgtacacagccctgccatcccgctcagcagccaggacctgttcccaggaatgtgggtggtgggggggcaggggctgctcttggcagtgttgaaagagggctgtgcccagtgcccacacacacacacacacacgcacgctgtgcaggcctccccacctcaaatgccttgttgcctttttacaacttttctttcagtgagacctacataaaacaaaaagatgactgtccccactgagcactgcccctcgactggacaaggcggttagggcaaaggtctgccagtcttgcagagaaagcagcccaggaggccagggagggccggagggatgcagcaccccctggggccggcacaaatgttccacggcccgctgcgctctgcacgcccagtgttggcacgtacacacaacagttcccacggtggggcacacctgggtgttcaacgtacctcaaggcctcctgtaaaaagggagggactcttacttccctcctggacttgacccaagatgccatctggactcaggctacacctctctggaaggaaaagccacacttgcgtccctccaccatttgtaaatttagggattgggccaaaacctactgctagaccactttcacagaccagtgggtggagccaggcaggtgacaagggccaccttactcaaaatctctgtcaaaaatcaggttccagaagcctcaaaagtttggcaaagaaattcagtttttttttttttttttgagacacagcctcactctgtcgcccaggctggagtgcagtggcgcaatctcggctcactgcaacctctgccacccggattcaagcaattctcctgcctcagccctcctgagtagctgggattacaggcatgtgccaccacgcccagctaatttttgtaattttagtagagacggggtttcaccattttggataggctagtctcaaactcctgacctcgtgatccacctgcctcagcctcccaaagtgttttggttttttttggtttttttttctgagacagagtctcactctgtcatccaggctggagtgcagtggcgcgatctcagttcactgcaacctccgcctcccaggttcaaatgattctcctgcctcagcctcccgagtagctgggattacaggagtgtgccaccatgcccagctaacttttatattttctgtagagacagggtttcaccaagtcgcccaggctggtctcaaactcctgagctcaagcaatccacctgcctccacctaccaaagtgttgagattacaggcatgagccaccggcctggaatgaagcttttgaatccagatatgaagccaccatcaaggtcttcctccactctgttcagtgtagaaaccccgtgagactctggtgacaggggagcagatgctcccaccaacaccacagattggccagatctctttggacgtcagattccagctgcttgagccgatacaaaacaaggaactctacagcgaccccacacacttccgggaaatggcatgatggtggtatccacggttatgcaagacgcccccaaaaccaagacatgccttccggggaggagtccctttgcagaagacaatccaggtgtccagctcacctgcagcagcaagcacagagcctggcagggaacaggccctccgcaaataacaaagggctggtgggctgctcggttgagtggaatgaatgaaagtcatcatctgagctgggcacggtgcctcacacctgtaaaatcccagcactttgggaggccaaggcgggtggatcgcctgaggtcaggagttcgagactagcctggccaacatggcaaaaccccatctctactgaaaatacaaaaattagctgggcgtgatggtgcgcacctgtaatcccagctactcgggaggctgaggcaggagaatcgcttgaacccaggaggctgaggttgcagtgagccgagatcacaccactgcactccagcctgagcaacagagtttgactctgtctcaaaaaaataaagaaagtcatccgctttgttgatggcttccatgaaacattacacacttttgagtctttacatgttccttctgactgccccacctcccacctgcccctcccactccccacacccacctggagaggcaggttgggaatgaggcaggtcaccccaaagcccacgagcagcaggttggtgaaggcgaaggcccgcatggcattagtgatcttctggatctgccggtcccgcttcttctttttcttctcgcctctgtggagacacagaacgtgcaggggtgggagggctccccggaggaagccgggtgctcctgagaagtcaggcctcaagcgtcgcagcaggtaaactgacgcaagactcagaagccacccaggcacgttttagggactgtgtcggggctggaccagcactacggacactccccggcccttctcagtggcaagctgagtgtgactctcggagggggtctcgggtacaagaagatggccatccatatgctgcagtgctctgtgaaggctgagctaagacgacggggagagaagtagcagcgtgtgcctgagctggcacatggcaaagcctcacttcaccactggcttcaagttcacccaaatcttgcaggacgctgataagaagccagatacaagccaaataggggagtgaatgggtttccccttgtggggacaggagagggtaaaggggaaatgagcaggcagcagatggaactggagtggacacaaataacctcttggctgcaggacctgacctagatagcacagcactgttttttgttttgttttgttttgtttttttgttctttgggtttttttttgagatggagtctcgctctgtcacccgggctggagtgcagtggtgtgatctcggctcattgccacctctgcctcctgggttcaagcgattctcctgcctcagcctcccgagtagctgggactacaggcacgcgccaccttacccggctaatttttgcgtttttgtagagacagggtttcaccatgttagccaggatggtctcgatcttctgaccttgtgatccacccgccttggcctcccaaagtgctgggattacaggtgtgagccaccgcgcccggccaagcaccctctgcaattatctctcgtgaatgaacgattaccgatcccagtctcacacccacgcagacaccctggatgatccaagaacggaccccaggtgctcacagatgtgcagggagtcccaggcccaccacttcctaactgtgcggccctaggcaaactactgcaagtcccagcctcagctccctcatctgtaaaatgggtataacactggtccccacttcgccagggtgctgggagtcttcactgagatactgtgcatggagtcctcggtggagggcctcaggcaataaaccgtagcttattatattaaggtgtggagccatggaaaacagcgtttggctgggcgtggtggcttatgcctgtaatcccagcactctgggaggccgaggcaagcggatcacaagatcaggagatcaagaccatcttgtctaacactgtgaaacccctgtctctactaaaaatatatattaaaaaaattagccgggcgtggtggcgggcgcctgtagtcccagatacttggaagcctgaggcaggagaatggtgtgaacccgggaggcggaggttgcagtgagccgagatagagccactgcactccagcctgggcgacagagcgagactccgtctcaaaaaaaaaaaagaaaaagaaaaaagaaaacagcgtttaactcatcctctgatcttggagcccatcccttacataaagtaggactccagtaccttgtttaatcttcacaatcatgaacaactctattaacacataatatgtttatagcaactcactactcaaactgaccggaataaaccttgcaggcagataacaaagggttggtgggctgcatgattgaatgcaatgaatgaaagtcaccatctgagccgggcgcggtgcctcatacctgttaatcccagtactttgggaggctttaagatggtgtagccactgccaaggggtggagggagggtggtcttaggagcaaaatggtctgctagccattgtctgtacactttcacctgtgtctctttttcttccttcttactcaatgcttcttctttattgttttttctttttgagacagtcttgctctgttgcccaggctggaagtgcaatggcgtgatctcggctcactgcaacctccacctcccgggttcaagcaattctcgcgcctcagcctcctgagtagctgggattacaggcgcgcgccgccaccgcacctggctaattttttgtatttttagtagagaccgggttttaccacattggccaggctggtcactaactcctgggctcaagcaattcactcacctcaaccttccaaagtgttggtattataggcatgaaccaccctccctggccaatttttaaattttttgtagagacggggagtgggggctggccatgtttcccaggctggtctccaactcctggcctcaagtgatcttcctaccccagcctttcaaagtgctgggattacaggcatgagtcaccgcacctggcctcaaactttagcatttccattgcattccaaacaatttccataaagaggggagcagttgaaacgcatgctgagctgaatgagtgagtctctctaagggctccgggagcagctggagtgcattgctctctccctctgtcccacccaccctgtgcctgacatgcagctctggggtctttctgcaggggctgcgggctgggagccggggcaccggccctgcctacgcactggttggcgtctttctcctcgggctcctcggaggcgtcttcacactccttcagcctccagtccatgatgtagccaatgacgggggccgtcagcaggcacagcagctggagcacgccgaagatggaggtgtagaggccaactgtggaggaaggcgctgcgtcatggggacgcctggcagacagccctggagcagggactgggcaccagctgggaaggggctggtccccacaggctcttctggggtctgccccagaaccccctgtcactatgggtcttgcgaggagcccggagaccttaactctgaagttgaggatggagcacggggcaggtcaccttcttctcggttccaaatcccctgcttgtttctaagaaacagctaatgaaacccagagtgtcacaatggccttcccagagctccaggaagtcgctataacttgggaactcctgtgacggaggctaagtgacgggccgttagtttctgtctctagaaatagcccagaacggctgggcgcggtggctcatgcctgtaatcccagcactttgggagcccgaggtgggcggatcacgaggtcaggagttcgagaccagactgaccaacacagtgaaaccccgtctctactaaaaatacaaaaactagctgggcgtggtggcaggcacctgtaaccccagctactcaggaggctacaaggagaatcacttgaacccgggaggtgaaggttgcagtgagccaagatcatgcctctgcactccaccctgggcaacagagcaagactccatctcaaaaaaaaaagaaatatcccagaaaggcaccgctcacggggctctgatgtcagggcttccatattcaaagacttaaaatgacagtggattttccagggaagcagacgaggaatgttgattgccccagttttacccccacggctctagccaggaggcatgtctggagcttgaggtgaggagcttctgggttgaacagagactggctgggaggggacatcacagcattccctgacaatcccccccaccccccgcttacccgtggccatcactgcatcaagaaagcaaaagtgaaaaagcagaaagaagagaggttagtggcagaaatctcagtgctacagagagatgggagaggaggcaggctcactccatgcccagcacgcactgcatttcccacactgcgtttcccgcactgcatttcccactaagcgtgactcggggcgctcaggggaggcagagctgcagccaggcctctggaagtggacttgggacaatgcccagcccgggcccctgctgacattctcctgtctgctggtgccgggtcacaggcggactggtgaatcaggcctgtgacgttggcgggtagcgtgatggggaagtggcgggcatgcggaagacctggtgcaatcagggtccctgtcaccacactgcctgcgggaagcggctctgtcacatctacctcctgctgtgctcagagagagggaaaggtcaaagaacctgcccctgatgcccagccaaggcatctgacaccatgggtctcctccagatggccagagctggtctcccttccactccaagaaacggggaccatgcctgggcctgctccccttccttgggccatggcccccctgccacagaggcctggtggcccctgagctgctgctccgagtggaatgtcctggtctagaggcccttggctgctccagtgtcttaagacccatatgtgagtgctggctctgaccttgaacaagctcctccatcactccaggcctcgtttttcaggtgtatatgatgatagtatctatcataaatgatgacgtaaacagatgatagtatctatttaactcctagattgttatcaagtcaaggacaacaataggaaaacatgtcacctgtcaactcttacaaagggagggtaggacaggtggcccctgactagggggtgggggtgcagggggcacccgacccatctggccagccacagcctctgtaccctgctcccattttcaggcctcaatccccaagcactgttggccctggactgttttccccccttaattctgtttctcaatgcctgcttcttcccagtaagtgccacaccctgagggtgggtgggagagtgaggcagcagtgcccactttggctgggactgggcactgctgaggacagcatgggccacgtcttccccatctcaagactggctttttggctgggcatcgtggctcacgcctgtaatctcagcactttgggaggctgaggcacgtggatcacttgaagtcaggagttggagacatggtgaaactccgtctctactaaaaatacaaaaattagctgggcatggtggcaggtgcctgtaaccccagctacttgggaggctgaggcagaacaatcgcttgaacccgagaggcggaggttgcagtgagccgagctcatgccactgtgctccagcccgggtgacaagagcgaaaatccatgtcaaaaaaaaaagactgtatttttggctgggcattgtggctcatgcctataatctcagcactttgggaggctgaggtgggagaactgcttgagcccaggagtttgagaccagcctgggaaaaatagcaagaccttgtctttatggaaaaaaaaaaaaaacaaattagccaggcatggtggcacacacctgtagtcccagatacttaggaggccgaggtgggaggatcccttgagctcaggagtcggaggccgtggtgagctatcagttgcaccactgcactccagcctgggtggcagagcaagaccccaactcaaaaaaaaaaaaaaaaaaaaaaaggcggccttttcccagctgccagcaccctggctagttagggtttccctgaatccgcaactcctgtttgatggcgggtctcaaacgctgggaggcagcagagtcaccggtcagcggcaaggcctggagtctccattcggaaccagcacccgggagcctctgccgcgggtggtcgcggggccgtacgcggaggcgatggctctggtgctttgagccgttcctcagcagcacggcacaccccctcctgcggagccgcaaagctcacgagtgtgcggaaagtgacccggaccctgcagctgcctctcggccggagctagggctatgggtgttgggtgtaacgggtcacagaaggaggagggggaaaaccagtgcctcgtctgccacagaccaaccttcctggcctggcttcctctacttcttgaaattgactttttgaacatacgaaacagttggaaacattcctcctgggcagcaaaagatttctcagacagcttgagtaaaagacgctgactcagcagcagggagatgagcctttcgagggccagggaccagctctctctgcacactttggggtttccgccactccagggctgaatgtttatcaggctgggtgtggaggtttacgcctgtaatcccagcactttgggaggccaagaggggaggatcccttgagcccaggagttcgacaccaacctgggcaacacagcaagaccctatctctgcaaagaatttaaaaattagctgggtgtggtggcgcgcacctggggagccctaagaggtcaaggctgcagcgttcacatcactgcactccagcctaagcaacgcagaaagagaccctgcctcaaaaaaacaagaaagaaagagacatgatagattagggttccccaaagtgtgttccacagatatttttttttcttttgagatggagtcgcactctgtcgcccaggctggagtgcagtggcgcaatctcggctcactgcaacctccacctcctgggttcaagcaattctctgcttcagccttccaagtagcagggattacaggggcccaccaccacgcctggctaattttttgtatttttagtagagatgggggtttcacaatcttggccaggctggtcttgaactcctgacctcatgatccacctgcctcagcctccaaaagggctaggattacaggcgtgagccaccgtgcctggcctagactaccattttcacagtagaactggctgttatctggttccctttgctatcttttccttttgataaagctggatttctcatcccctaaaaacctgataactgattcttcacaagtcctagggtatcttcaccttgataaaaacaaggaaaccatcggaaaaagtggcacaccagggaggctgccaataaaaaggatttggagtgtttgtcccgcctggggatgactaaggctgactcagctcaggccccggggaagtcctgactttctctgtagaatcaaaacctctaatcagctgaagacctgccctgtttggaaaagtggactgtgggttatcagctgtgtttgttggagctgacaagcctcaactgttcgcaagctccgaggaagtctctgccctgccctgtttctcggtgagggatgcagatcccagtgtgggccagttgccccagcgtctccagccccgtcctgacctcgatgcccagggtgtccacgcacccaccgtgccactttctgggaggactttgggcttgacctgctgtctttcagccatgctcaggtggagcgttctgttctgttttcatttacagacacacacggcaaccctccccctcaggcactggaaaacacacaccccacaccccacacccaggaggctattttggtccttccctccctcctggaccaggaaaccctgatggggacacgaagaaacagttggggctggcagtgatgcaatagctctgacgggcagacagctcctgggatgcggcctttccatggcccggctggcccggctcagcttaacacattctggccggtggccagtgggctgggctcaggccggggagtgacagcgaccgaggctgcccggggcacctacctgtcttctggtcgccgctgaccaggaacttgaggatgttgttcatagcccccatgtagaagatgagccgcagctgcgtgacgcacatggtgaccaggctgagcagcaggatggggctgaacacgctgtgcatgaaggagggggccactgcagggagagggtgcggggctcagggccggggcacactgtccccaccaccggggggacacgcagatccctccacgctggaggccaggagggggccctcgggacgggcctggtgagggtaacggggttggcgctgcggtggggtcacctcttgggtgaaatcaggcaaatccctttccctcccccaggccttcctgagcgcctctgcagaacagggcgggcggggccgcctccccttttggggtgaggtgggaatggggtgagccgatacccacagagcactccctgcccgtcgcccggctgcggtctcaggcgggtacctgcggcatccggctggcacttcacctccaggtcgacggtggacaggcacagcttgtggccctcctgcagcgccacctgctccttggcactcctcatggagctgcccacactcaggcgccggcccaccgtggtcacctgcttgtagaactgcttccctgtgatcttgtggtcaaagcccagccagctgaacttgatcttcaccctggggccccgggagagtgtctgtgggtgctgcccgggaccccggctggggggcgggggctgggggcaggcgggacgggggcacctctacttacgagtagtccatgtcctccggccccgggaagggctcaaggggccagttaaagaagcagttgaggaaaaccagcccggagcagccggcccagaccacgaggacgacgatgaaggagacaccagcatcatagatgagctgacaggcaccgcggggacggggtgggggggggagggggcagagttagcccggggaggccagagccgcagcaggcaggggcgtctggccacccctgctgtccctgtgctgagccgcgcaaagaggcacagccctgccagcctgggcgttggggcatcaggcacccgccttccagtcctcccaccgtgcctgccctgctggtcatctgggcctggcgtgtgattagccccccgactcggaggccttcctgaccgccccgccatgaccacggcacgtcttgcaggctcatagtgatcggcccagcagaggggacggtgctcctggtccgtcggcttgtctggtattagcggagctccctgaaggcgggaaccggccagccccgtccactgatgcttccccagtgcctctgagagctcacatggcagaggccaaagaaatgctcaaggaagccaggcatggtggctcacgcctgtaatcccagcactttgggaggccaaagtgggcggatcatgaggtcaggagttccaggccagcctgaccaacatggtgaaaccccatctctactaaaaatacaaaaattagccgggcatggtggcgggcacctgtaatcctagctccttgggaggctgaggcaggagaatcacttgaacctgggaggtggaggttgcagtgagccgagatcgtgctgctgcactccaacctgggcgacagagcaagaccctgttcccccccaaaaaaaggaggaggaagaactttcgggatgctccccagtccaggggcatgagaatctctgcaagtccataggatggctggccccagagtcccagctcccaccacttcaatgcccaggtggccagcccacaccgtgtccccctctcctcgccaacagcattcccacacacaccaccgaggaaaggggcttttacttagtgtgagggtcagaggtgggagaagcccctacggggccctggcagacccacagggtctggggaacttgggctgatggactgtgaggtgtttgcttcgtcctgaccctgtgtgacttccacaggctcaaaatcctgcctaggagggaaacagctgaaacacttggccaagagcagtgctttggctggcggggagtaacggtacaataacagcaggctgggggttggggagcaggggagcagcgggagaccaggatgacggaggagacgggggcaagactcacaactggaaacagactcacccaccgcccttcccctgccccagccccgaaatgcaaaggcacctgcggcagatcctgcagccacatgcgtgattcccgtcccctgaggccccgcggttttcatttgtcgcccctgtgatgcccaggtgcatcctgcccgggtgggggtggtggagaggggccaccccgggtgcccacaattgcctccctcttcagagagggtggaaggagcctggagcaggcctctgcacagacaccagtgcaaaatacacgtgctcaccttgattcctggaaaggtgactgccgaggaggcgtaggacccaatcatcaaggcaataaacgtggaccgaaggtcgccgaacatgttgggcagctgagagataagaagcagagaaacctcagtggggaggatgcaccagggaaggggaggaggaggggacagagaactaggccccatgaggccccttcttcacctgcgccccttcctgtgtgactcacaggggcattagttcaggggcaatgaccgctcactgaaggtttctccttcatggactgaggctgatggggccaaggagggaggtaatgcagaatacaagcagttgtctgactttccggctggcaaccctccctatctctctgctcctggcagagcccaggagccttcttgtcttttcagggtaacactgagatgccagagaacaaagttatgagcctcaggcagccctcaaagggagaaagcctgttaaaaataagaatctatttggggataatagcatcattttataaataaaaatatcagcattccagaaagaccagatgtcagcaaaaactgcttttggtttggagagggtaggtttttggaagatgtcaatcagaattctacagttctcttcggtctgaggatgaagctggcccaggattcctgcttctgaatttcttttctttgttttgagatggggttttgctcttgttccccaggctggagcgcagtggtgtgagctcggctcgttgcaacctccgcctccctggttcaagtgattctcctgcctcagcctcccaagtcgcgagattagagatgcccgccaccatgcctggctaatttttgtatttttagtagagacggggtttcaccatgttggccaggctgatctcaagtgatccgcccgcctcggcctcccaaagtgctgggactacaggcgtgagccaccgcgcccggcctcctgcttctgaatttctcagtacaagcaggggattatcttcccacaggatgttcggcccgagcagttagcatcctggaaggccaacgggaagcaaggtccgggctctcttcccaacgaagccactctcggcatctcacatcagctcattctgggtacagggcaagagggggcccacctgaacaggacttcaaggctaactcttgctcattctaccgaaatccaggcctagggcaaactacatcctcccaaagaggcacaggttctctaacctcaagagacatcacactgtgtgtagcaaacctttcctgtccacacccagcgtccctggccttgggggctgccctctggatagccatgccaacctatttcattaaattcaggctgcttatggggacttaatctatgtcccctccaccctccccaccactccccatttgtcttgaatctttttctttctttctttctttttttttttttttgagacggagtctcgctctttcgcccaggctgtactgcagtggctctatctcggctcactgcaagctccgcctcccaggttcacgccattctcctgcctcagcctcccgtgtagctgggactataggcgcccgccaccacacccggctaatttttttgtattttcagtagagacggggtttcaccacgttagccaggatggtctggatctcctgacctcgtgatccgcccgccttggcctcccaaagtgctgggattacaggcgtgagccaccgcgcccaacctttttttcttgttttaagagacaggatctgctggacgcagtggctcacgcctgcaatcccagagtgctgcctttgacctcagagtttaagaccagcctggacaacatggcgaaaccctgcctctgtatctttttaaagttaaaaaaaagagagagagacaaggggggcagatcacctgaggtcaggaattcgagatcagcctggcaaacatggcgaaaccctgtctctactaaaaatacaaaaattagccggatgtggtggcaggcgcctataatcccagctacttgggaggctgaggcaggaaaatggcttgaacccgggaggcggagcttgcagtgagccgacactgcgccactgcactccagcctgggtgacagagcgagactctgtgtcaaaaaaaaaaaaagagagagagagacagggtctcattctgttgcccaggtgggagtgcagtaatgcaatcatagctcactgcagcctccaacttggctcaagtgatcttccccccccagctcccaagtcactgggacaacaggcccacgccaccatgccccagctagtggttttttttttggaggcagggtatcgctctgtcacccaggctggaatgcactgacatgcaatcttggctctctgcaacctccacctcccaagttcaagcgagtctcctgcctcagcgtcctgtgtggctgggaccacaggtgtgcaccaccatgcccggctaatttttgtattgttagtagagatagggtttcaccatgctgccaggctggtcttgaactcctgacctcaagcgatccatctatcttggcctcccaaagtgctgggattacaggcatcagccatcacgcccggcctttaattatttttgtagagatggggtctcactatattgcccaggctagacttgaactcctggcctcaagctcttctcccaccttggcctcccaaaataaataatttttgttttatcaaacctgcctgcctgcaagcaaattaactgttactgagcggagggagtttgaacttggcgacatacctgtctgcagtcactgctgcctgttttgcccacttttaaaaatgagtaagggatgtcagcaaaatttaaaacctctgtgcttcaaaggatggcatcaagaaagtgaaaagagagccgggcgcggtggctcacacctgtcatccccgcactttgggaggccgaggcaggcagatcacgaggtcagcagttcaacaccagcctggccaacatggggaaaccctatctctactaaaaatacaaaaaattagccgggcgtggtggtggacgcctgtaatcccagctactcgggaggctgagacaggagaatcccttgaaccgggagatggaggttgcagtgagctgacattgatccactgcactctagcctgggcaagagtgcgagactccatctcaaaaaaaaaagaaagtgaaaacaggctgggagtggtggctcgtgcctgtcatcccagcactttggaaggctggggcagcgggattacttgagggcaggagttcaagaaagtgaaaagaatgcacagaatgggagaaacttcttacaaatcacagatcaagagcttgcatctagaatatataaacatagtgcccaacagttattcaaaaaacaaaaaatagaacatataaagaacccctacatctcaataataaaaagataaataaccaatttttttttttagatggagtctcgctctgtctcccaggctggagtgcagtggtgcgatctcggcccactccaacctctgtctcctgggttcatgccattctcccacctcagcctcccgagcggcacctcccattgcaggtatgtgccaccacgcccagctattttttgaaataaccaattttttaaatgggcaaaggatctgaatagacatttctccaaagaagatatacaaatggccaataagcatatggaaagatgctcaacatcattaatcatagtgaaattcaaatcaaagccacaatgagataccacttgatacccattaggacaccaaaaagtcacagtgaggccaggcgcggtggctcacgcctgtcatcccagcactttgggaggccgaagcgggcggatcacgaggtcaggagttccagaccagcctagggaacatagtgagaccccgtctctaccaaaaatacaaaaacttagcgaggtatggtggaacatgcctgtaatcccagctactcgggaggctgaggcaggagaatcacttgaacccaggcgggggttgcagtgagccgagatcgtgccactgcactccagcctgcgcaacagagcaagactacgttttaaaaaaaagaggctgggcacggtggctcacgcctgtaatcccagcactttgggaggccgaggtgggcagatcacaagatcaggagttcaagaccagcctggcgaacatggtgaaaccccgtccctgctaaaaaaatgcaaaaattagccaggcatggtgacgtgcacctgtaatcccagctacttgggaggctgaggcaggagaattgcttgaacccgggtggtggaggttgcagtgagccaagattgtgccactgcactccagcctgggcgacagagcaagactcaaaaaaaaaaaagaaatgaggccgggcgaggtggctcacgcctgtaatcccagcactttgggaggccaaggtgggcggatcacctgaggtcaggagttcgagaccagcctggccaaaatggtgaaaccccatctctacaaaaatgcaaaaattagctgggcataatggcgggcacctgtaatcccagctactcaggaggctgagacaggagaatcacttgaacttgggaggcagagcttgcagtgagtcaagatatcgccactgccctccaccctgggcgacagagtgagactccgtctcaaaaagaaaaaaaaaagaaaaaagaaaaagaaaagaaaagaaatcccttccaacagaagacaaaagaaatgtgatgtgctcacacgtgcccaggcacgcccaggtgagcaatcttactctctgggtacctgcctcccaggtaggttgcagttcaaaggacaagcctcggttcccaagctcacatatttgggctgctccattactgcactgtagcaaaggcatctccgtggccatatctaccccagtgagaatgcaaatatttgttctgcttatgcggaaggagggaagtgttcctgcccggcatgccagcacagccggcgcaaagaaagaaagaaagaaaggggccaggcgcggtggctcacgcctgtaatcccaacgctttgggaggccgaggcaggtggaccatgaggtcaggagcttgagaccagcttggccaacacagtgaaaccttgtctctactagaaatacaaaaattagctgggcgtggtggtgggtgcctgtagtcccagctactggggaagaggctgaggcagaattgcttgaatccaggaggcagaggttgcagtgagccgagatcatgccactgcactccagcctgggtgacagaacgagactctgtctcaaaaaaaaaaaaaagggaggcccagagaaggcttggaacccaaccagaagggcaaatggaagcccagagcctggctcccttggtgcagggtcaggtgaggctaacatgtaggttgctgcagtcacctttgggtaaaaagagtgtctcaaacttttcaacagagctagagaatgttccggaaaagcagagagcttgctagctaggcattttccttctacctttttaatctcaagcctgcctgccttaaccctaacctaggctacagaccaacagagccacagggccctggggtgaccatgtggccctgcctggtcttctggagtcttctccccagcactagatccaggatggggaagagcagaacctggggaagaggccgactctccatctgtccatggatgaggccttgccctcaggcctggacagggcaggggcctcccagctgctccctttgatgccctgcctcttgccgcctggaacattcttaccagcaccaagaaaattcttcccaacatgttattctggtcagcagggccattccttagggagtagagtgcctcaggggaaccacactaggtagccttcaaaccaacactgacatcttgtatttttaattatgatcttttccttagaacggcaatgcctgggctgggcgcggtggctcacgcctgtaatcgcaacactttgggaggctgaggtgggcggatcacgagatcgagaccatcctggccaacatggtgaaaccccatctctattaaaaataccaaaaattagccgggtgtggcggcgtgcacctgtagtcccaggtacttgggaggctgaagcaggaggattgcttgaacccagggggcagaggttgcaatgagccaagatcatgccactgcactccagcctggcgacagagtgagactctgtctcaaaaaaagaaaagaaaagcatatccattgcaaaatgtttggagcaaagtataaaaagaataaggtaaaaatcaccctgaggccagacgcagtggctcacatctataatcccagcactttaggaggctgaggcaggtggatcacttgaggccagcagttcaagaccagcctggccaacatggtgaaaccctgtctctaccaaaaataaagaaaattagctgggcgtggtggcaggcacctgtagtcccagctacttgggaggctgaagcagcagaatcgcttgaacttgggagatagaggttgcagtgagcagagactgagccactgcactccagcctgggcaacacagttagactccgtctcaaaaaaacaaaaaacttttactaatgactttcaacatttttctacaacttaaaaaattatttggccaggcgcggtggctcacgcctgtaatcccagcactttgggaagctgaggcgggtggatcatgaggtcaggagatcgagaccatcctcgctaacacagtgaaaccccgtctctactaaaaatacaaaaaattagctgggcgtggtggcgggcgcctgtagtcccagctactcgggaggctgagacgggagaatggcgtgaacctgggaggcagagcttgcagtgagctgagattgcgccactgcactccagcctgggtgacagagcaagactccgtctcaaaaaaaaaaaaatcatttatatttgtcctttttttctatggggatgttaatctttcttttttttttttacagtaagctatatattaattgaatatatatatatatatattttttttttttttttgagacggagtctggctctgtcacccaggctggagtgcagtagtgctatctcggctcactgcaacctccacctcccgggtccaagcaattctcctgcctcagcctcccgagtagccagggttacaggtgcctgccacgacgcctggctaatttttgtatttttagtagagacggggtttagccatgttggccaggctggtctcaaactcttgacctcaagtgatccgcccgcctcagcctcccaaaatgctgggattacaggtatgagccaccgcgcccttccaatatttcatttaacataatttcaaagtaggtctgtgctctaaggtgagcaaaagaagagacattctaaatctcataagagatttttttttctttcctctttttttttttttttttttttggagacatggtctcgctctgtcatccaggctggagtgcaatggtacgattctggctcactgcaacctctgcctcccaggttcaaatgattctcctgcctcagcctcccgagcagctgggatggattatagccacctgctatgacatccaggtaatttttgtatttttagtagagacagggtttcaccatgttggtcaggctggtctcaaactcctgacctcaagcgatctgcccacctcagcctctcaaagtgttgggatgacaggcgtgaaccattgcgcccagacttttttttttttttccacactgttcctctgagtgaggaatcaggtttcaggaccctcaatgttgacaactaacattttacccttgagattttacctagagataccgaaagaaaagataacatctgaatacaagaatcgcgttgcatatttgctgcctccatagggttgttgtggtagcgactgattttccacccctcccagtttggtggtgtttgtttgtttgtttgtttgtttgttttaagtaaaatgtcagaaatgcaaaaatgctgcatttatttcccttaagacattgaaaatagtggaagtttgcagatttttaattcttcgtaggtctgagctggcactagactgctaccaaaggggtctgttccacacgctaatttcaggcttgcggaccatcagcaaactgcaatgaaacctgtgggcatgaatcttccagagtggtagaatctcattcccatatgcccgccaagtttccaggtgtagctgggaaaacccaaatgttccctggatcccgagatggctaataagcactcaggcctgctacaccaccgaacagagccccacagccagagaggcacacggcctgcttcacacagccgacaaccccgctggaaacaaccagtgctgggagccaaggccaaactgatgcaaaggcgctactgagccagagcccttctgcaccgagactaccccaggcatgcaccgccctcccaaaggtccaaaacgatgcaaaggcgctactgagccagagtcgtgcactgagactaccccaggcatgcaccgccctcccgaaggtccaaaccaatgcaaaggcgctactgagccagagtcctgcattgagactaccccagacatgtactgccctcccgaaggtccaaaccaatgcaaaggtgctattgagccagagtcctgcactgagactaccccaggcgtgtaccaccctccggaaggtccaaaccgatgcaaagccactattgagccagagtccttctgcaccgccctcccgaaggtccaaactgatgcaaaggtgctactgagccagagtccttctgcaccgagactaccccaggcatgcactgccttcccgaaggtcccaaccaatgcaaaggcactattgagccagagtcctgcactgagactaccccagacgtgtaccgccctcccgaaggtccaaaccaatgcaaaggcgctattgagccagagtcctgcactgtgactaccccaggtgtgcgccgccctcctgaaggtgcgtgtgggtcgacaagggtgcacaagcggcagggggctgcatagcaaggtctccttcagctttgttttaattatttttatagagacagggtctcactctattgcccaggctggtcttgaactcctggattccagcgatccttccaccttggcttcccaaactgcaatgattacaggcatgagccactgcacccggccaatctttgtatattgattttgtgaaggctctttatgtattaaagacattcattcacaggccgggcacggtggctcacacctgtaatcccagcactttcagaggccgaggcaagcggatcacctgaggtcaggggtttgagaccagcctggccaacatagtgaaacctcgtctttactaaaaatacaaaaattagccggacatggtggcaggcacctgtaatcctagctacttgggaagctgaggcagaaaaatcgcttgaaccccagaggcagaggttgcaatgagccgagattgtgccactgcactccagcctgggcgacagagcgagactcttgtctcaaaaattaataaaaataaaataaaatgaagacattcacagttctatatactatgaataaattttcctagtttgtcatttaacttcttaattcatggtgttttgttttttcagtttttttttttttttttgagatggagtttcgctcttattgcccaggctggagtgcaatggtgcaatctcggctcaccgcaacctccacctcccgggttcatgcgattctcctgcctcagcctcccaagtagctgggattacaggcacccgccaccacacccggctaatttttgtatttttagtagagacagggtttcaccatgttggccaggctggtctcgaactcctgacctcaggtgatccacccgcctcagcctcccaaagtgctgggattacaggcgtgagccactgcgcccggccgagggttttaaagatcataaatagggtaggtattaacaatagttactattatgatatgtgttatgacttcataacagggaaaatcttctggtcaagctgctcctgggcatagccaacgagggaagtgtcctctggcaggaaccacagctctgggaggaagaaaaggaagccgactacaggataaaacacaaattagtattcccctttaaataaataattagtgtccacagagatggcctttcttctcctgtccttgttattctgttgtgaccacacattgactgctgtcaggatgtttatgctttgggtttcactggtcaaggtcatccttcatgttctcttcagagaggtttcatttgacacaaatgctaggtactccctaaaagctgaaacacacttttgaccacctatttaaaaacttttattggtcaaaaaacaccatgaggccgggcgcggtggctcacacctgtaatcccagcactttgggaggccgaggcaggggatcacctgaggtcaggagttcgagaccagcctggccaatacggtgaaaccccatctctactaaaaatacaaaaaattagccaggcgtggtggcgtgcacctgtaatcccagctactcggcaggctgaggcaggagaatcgcttgaacccaggaggcagaggtggcagtgagttgagatcgcgccattgcactccagtctgggcaacaagagtgaaactctgcctcaaaaaacaaaacaaaacaaaacaaaacaaaaacttaaagattagaaaagtcaagggactcccccaagctagtaatggtcagattggggattcaagccaggccaagcctctgtgtgtaggccccaggccacgctgcctctctggagtctcctgtggctccggccaatacacacttcagtttggatcccacggcttttacatgtgccttattaagatccaatctgcgcccttcaactagaggtttatttttcattcatttacttatttattttttgagacagagcctcactctgtcgccaaggctacagtgcagcagcacaatctcagctcacttcaagctccacctccctggttcaagcgattctcctgcctcagcctcccgagtagctgggattacaggcatgtgccactacgccacgatgcccagctaattttttttttgtattttgagtagagatggagtttcgccatgttggccaggctggtctcgaactcctgacttcaggtgatccatccgcctcggcctcccaaagtgctgggatgacaggcgtgagccaccgcgcccggtcatttttttaaatttgtttttggagatgaggtcatgctgtattgcccaggctggagcgcagtggctattcacaggcatgatccctctactgatcagcaggacacttttgacctgctctgtttctgacctgggccggttcagccctccttaggcaacctgggggtccctcaccccccggaggtcaccacactgatgctgaacttagtgtagacatctcatcaacacagcacgctattgtgcagaactcctgggctcaactcatctgcccacctcagcctcctgagcagctgagactacagggggataccacaatgcccagtccccaactagagatggcttacattccttctgaagctccttttagacccatctgccccctgccctcacctcctgctgttgccttcggctgacctccccatggtccagcgccacagcatcggatgggcttgcatttgcctgtggactcccgtaggtcatcctgacatctgggtcactccccacattccccctctcgctcactccgtccccagcttccctgcctccaccggtctcagctgcgcataatggctgttcgaagccgcggtgccggagtgagggctgagcgctgagcagagcgccctagcgcgggcctcgagggctggcggaggggaaggaccccaggaggggaaggaccagctttgctgccaagcaggaagccggagctgtttcctgactcaccaccacactcacaggtgggagtgcaagcccctcttcccgccctcaggtgcttcccacagccccctcgccgcctctgcctccgtgcgggtcaacctgtcctgccagcccgggctgttcactcactgcctccacgcagcctcagtcacacagggaagcccgtgactctctctctttcagccccctggctgcagcataaacaggccggactgtgtgaccttcccagaggggaaaacagcagctgcaggcggcccctcccctggcattctggccatagagcatgaccaccggacaggagtgcctgcagggccaaggccctgggacagtgcgggcgcgggagcttctctaagatgccggacgtacgtgccttttggcccagggcaggccatggcattgctggcaggcagaaacaaggggcaaccgtggcacccccggccctgactttccacatccacggactcccgagtcctccctggcctgcaggaggctggggagctgggtggtgggtgggggctgcggagctgggaggtgggtgggggctggggagctgggtggtgggtgggggctggcattctggccctcgggtcccctccagagggagccttgtccccaagtggctggagtacacacccagagttctgtacaacctgcacaggccgggatcccggaaccagactgcacaggtagactctgccaggctgggctgtttcctacccacaacaaccgggcacctccaagcacatgctgcccgggacaaggtccttgtggtcacctttctgcttcagtgctgaagggaggggaagggtgtgctcccctcccccggccacctcctgtgccttcccggccgggtccagtcctgccaataccgctgccctttccgtctgaacgtggtcacatactgcagcaaattcatgaggcagaaccctcagatggcaaattctccccaaaccaatggcaagtagctgactgcctgagcttccccaaggtacaggacagaaagagaggaaggtggggaggcacagcaggcactgggcactggcaagtcccgctcaccaggcacctagaccctccagagctggccgggggccaccgcgggaccctctcctggaccctccagagctggccgggggccaccgtgggaccctctcctggctgcagacgcggggtctactgagccacggcactaaactcctgtcccctctctgggggcatctgccatcctgccctcctctccaggatctgaagagggatgtttatcctcttcacttccctcagatcccacctcccatgaaatcatgccttcctcaggtttaaagtcagacttgaaggaatcaaaagggaaaatccacagagaaatgtctcatcggggagcctggcaacattttgaaacccgcttttctgtgtggcttctgctgagaaatccccatcccacccacggggacaggggtcagagtaatggagtggaaatggcaggttcacaattttggctacagctgctcccatctctaagcaacccaggctccgggttggagggtggcgaccccaagatgcggcctcagccgccggccgtgtttgtgctccagccgatgaagcgagtgcaaagggctgtacaaacgcgaggcactgaacaaacactgagcgtgccgtccagatgtcccgggggaggctgaggatccacaccgtggggagtgctctgcccccatggagtgacctggcgtccgccctccacggatggcacgcgatggcccaggccctgtgctgcagggccctgggagagccagcactggctactgggcagcctacctgacgcgacagccacccttgcccctcggagcctccacttgggagggaaataccaccatgggtgccgacctcttgggctctggaaggatggctcatggccatctccttctggactacaaggaaaaggcgtgtgcccgcttggagccccctctcctaccagtgggggtaacagctcgcagcccctggtcatctgtatttagaccacagcccatgcagcacaaaggccccgggacccaggaagtccccgaattaaggcttccacagcgccgtcccctagagtcctgggttatcacagagctattatccacagccccaacatggttgttgaagattggagttagaaattcctaaaggcgaccctggagactcctttgtcccccaaattagaacacgggtgggagacacaaacagaaagtgccattgtgccctgagcttggcgtctctgggagctgatcccgacagttctgctttctgaagtcctgggttgtatcagaatgagattcggctctgctcagcagaagccccagtcagcccaagagtgttgcttaactgcttcagccctgtcctcactgacctcatttcccttttggggtctgttctcaaggagcaggcactggagccctcatcagaggcctcagggggcaggggaatgcccatggaactccctccaccctggggggaggcagaaagagatgacttagaaggagagctggcccatgcaaccagagggtgtgggtgtgaatggtgggtgtcagcacatgccctcagacgaggaacagtgacgtagcagcttcctggggcctctggaccaagggttggcaaactttttccataaagggccagacaatagacttttttttttttgagtcagagtctcgctctgtcacccatgctggagtgcagtggcacaatctcagctcactgcaacctctgcctcccgggttcaagcaattctcctgcctcagcctcctgagtcgtggggactacaggcgcccaccaccacatctggctaatttttgcatttttagtagagacggggtttcaccatgttggccagcctgctctcaaactcatgagctcaggtgatccacccgcctcagcctcccaaagtgctggggttacaggcgtgagctagtgtgcctggctaagacagtagaccttttgggctttacaagccatatggcctctgtcacgactgcgttgactctgatgagataccacaaaagcagccacagacaggagcaaacaggcacagctctaccccatgaagttttgtttacaaaaacaggcagtggtctggatttggcctggcaatggcggtttgctgactcctgctctagatcaaaaaatgaaaaccttgaagaacaaaccaacagcctcccttagacagacctctggtagccaaacgcttcaaatggtgatcaggtgactctcttgcctggtcactctctagcctgtgtagctttttgcctccagtgggagagcaaagagtgaatagaaacgctcctgccacagtggtttgtgtgttttgtttttttttttaagacggagtctcactctgccacccaggctggagtgcagtggtgcgatctcagctcactgcaacctccgcctcccgggttcaagcaattctcccacctcagcctcccgagtagctggaattacaggaacatgccaccatcccaggctaatttttgcatgtttagtacagattgggtttcatcatgttggccaggctggtcttgaactcctggcctcaggtgatccacccaccttggcctcccaaagtgctgggattacaggtgtgagccaccgcacccggccaccgcagtggtttttagccttcacacagacctgccagaggccagtgaaagtaatggaccctcccctccagaaagacacagctgagcagcacctacacacgctttgttggcatggaatttcaagggtgtgcacggctctcctgaagcttactcatggaccatgtagagacctgaaaaccccagggtaagatctcctgctcactcggaaagaacactagtgtctttgtatttgaaagagctcttacgagtcactaaatactaataataataaaatcaagagcactgtagaaaaatagacaaatgacacaaagaagcaattcacagaagaaatgcaatttaccaataaagaggagaaaaaatgctctgtctcactaataatgaaataaattttaaaaatggcatgtcgtttttcataggatcagagtggctatgttttaaagaggaatgacatggcactggaagggacatggaggaaaagacactcgtgtacgtgctggtgggcctgtggtggcaggcaggcttttttttgagacagaatttcactcgtcgcccaggccggagtgcagtggcgcaatctcgactcgctgcaacctctgcctcccgggttcaagcgattctcctgcctcagcctcccaagtagctgggattacaggcgccctccaccaagcccagctaatttttgtatttttagtagagacggggtttcaccatactggtcaggctggtctcgaactcctgacctcaggtgatctgcccgcctcagcctcccaaagtgctgggattacaggcgtgagccactgcgcccggccagataacatttttagaagactatttaacagtacatattaaattttaaaacatgctaatcctgtggcccagggctgccaggaacttattttacagaaatacatgtacagggatgctcacttcagcagcattcataaattggaaaaattgggaaccaagccaaaagtccattagttggaaacaggttgaataaatgatggtccatctatattaaagaataatatacagaactgcttaataataaggcagatctctaagtactgacaggaaaggatgtaaaagatacattaagggaaaaggcaagttatcacagttcttttttttttaagaaaaaaaaaaagaataacactggtacatgcagatcttttaaatactgaagaaatatattccaaactgatgaagacaggctgatagaattttttttttttaaacggagtttcgctcttgttgcccaggctggaatgcaatgccgcggtctcggctcactgcaacctccgccacccaggttcaagcgattctcctgcctcagtctcccaagtagctgggattacaggcgtgtgccaccatgcccgagtaatatttttgtatttttagtagagatggggtttcatttcaccatgttggccaggctggtctcgaactcctgacctcaggtgatgggaaccttctcagcctcccaaagtgctgggattacaggtgtgagccactgcgcctggcaggctcatagaagtttagtctacaattcatatttctgaaatgttaaatttttacttttatttttgggacaaggtctcgctctgtcacacaggctggaatatagtggtgtcattgtggcatactgtggcctggaacttctgggctcaagccttcctcccacctcagcctcccgaggagctgggactacaagcaactgccaccatgccctggctaattaaaaaaaaaaaaaaattggagagacaaggtgtctcgctatgttgcccaggctggtctcaaccctggcctcaaatgatcctcccaccttagcctcccaaagtgctgggattacaggtgtgagcaactgctcccaacctgaatttttaaaataaaatcatttttgggccaggtatggtggctcacacctggaatcccagcactttgggaggtcaaggtgggaggatctgttgagcccaggagtttgagaccagcctggtcaacatagtaagaccccatctgtaaaaaatgaaaataaaaaatgtaatgaaaaaaattttgttttataattataaaacataaaaaaagacaaagaattcttactggcctattagctccaaccgcagggtcccttttaaagtctttctttttttcctttttttttttttgagggggagtcttgatcttgtcacccaggctggagttcagtggcgcgatctcggctcactgcaaactccgcctcccggcctcaagcgattctcctgcctcagcctcccaagtagctgggattccagggacccaccactgtgcccagctaatttttgtatattttagtagagacggggtttcactatcttgggccaggctggtctcgaactcctgacctcatgatccaccacccccatcggcctcccggagtgctgggattacaggtgtgagccaccgcacccggcctaaagtctttcttaacagggattcttggtcgtttttcagacaaaacacctctcggcatttcggggtgtgaggtcctcaagctcaaggaccatctcgttcctttatccctgaaattcaggcctgccgtgacagaggcgtcgcgtgactaaaataatggaggtgaggccaggtttttagttttcatgctgatgaaagagctgctggttttcggccgagcgccgtggctcacgcctgtcatcccagcactttgggaggctgaggcgggcagattgcctgagatcaggggtatgagaccagcctggccaacatggtgaaaccccgtctctactaaaaatacaaaaattagcgaggcgtgatggtgcacgcctatagtcccaactactcgggaggctgaggtaggagaattgcctgaacccgggaggcggaggttgcagtgagccaagattgcgtcactgcactccagcctgggcaaccgagcagactcaaaaaaaaaaaaaagaaaaaggaaaaaagaagaggtccagaagcccccagagctccctcaaagctaaacaagaacccttcaatggcacgacaagggaaatcagaaaccagagtgtaccacaaatagtaatggtaggtactgtgtcttagaaactttttcaccggtaaactgatgcaggcgaggtttccttgatggacagaagcctctctgaagaagctattattctcacttctttcccaatggccagctcggaatggcacaattgcccaactgggcgagcccacagagttcccttcttccctctgggagagactttttggttcctcttttgactttcttttttgttgttgtttttgagacagagtctggctctgtcgcccaggctggagtgcagtggcttgatcttggctcacggcaacctccgcctcccaggttccagcaattctcccgcctcagcctccgagtagctgggattacaggcatgcaccacccgcccggctaatttttgtattttttagtagagacggggtttcaccatgttggccaggctggtctcaaactcctgacctcaagtgatccgcctgcctcagtctcccaaagtgctgggatttcaggtgtgagccaccatgcccagccccttttttgactttctttctttcaaccccaccttccttctgcctccctgacatcaagaaggagcatattttgtgatgtcctggggctcccaacaagggggtgcttagtaccccgagaaaacatctcccccaggcgactgtctgtgcccgggcacggaggaaacaagaggagcagaagaccagatgttccctgcattttccatctggctccggacaaaggcaaaggttgaggcagttccacgggaggcgggtggtcaggctgctccatgagccgaagctcccggagaccctgatgacagctgccgaggaaaacaggaaaagaaagtgggcggcagcgttttgtcttcctgcctctgccttccttgggcacaaggctagtgagctgcttccgcagcatcaaagcccagatcagaaggcagggaatgtcggccaggccaggtggctcacgcctgtcaccccagcgctttgggaggccaaggcgggtggatcacctgaggtcaggagtttgagaccagcctgaccaacatggcgaaaccccatgtgtactaaaaatacaaaaattagccgggtgtggtggcgcacgcccatagtcccagctactcgggaggctgaggcaggagaatcgcttgaacctgggacgcggaggttgcagtgagccgagatccccccactgcactccagcctgggcgacagagcaagactccgtctcaaaaaaaaaaaaaaaggcaagggattgtgaagccacgccctgctgcctgtggacctcagctgaggaggccctgccaggccacctcgcccatagcccctctactgtttgggacacccaggcacatgcaggcacatggaaggcaaggaaacagaaaccaatcaaagcggcctcaaatttagaaacagattactgaactacagagctttaaaaaatctgtactcactgttaatgaggtgaaggtcatacacatcccaccaaagccattcagagccagggcgatgaagatgagcacggagagagctgcagggacatggaaagctcgtgagtggagaccccagctgagctccagggaagccgggaccagcccagagtcctgcgcggtgcaggctcccagtaaatccagtaaacgcaggccggggttagtacctgacatctggggagtggaactgcccctttctcaccccctcctctaggcctatttctttttcttttttaatcgagacgtagttttgctcttgtcacccaggctggagtgcaatggcacgatcctggctcactgcaacctctgactcccgggttcaagtgatcctcctgcctcagcctcccaagtagccgggattacaggcatgcgccaccacacccggctaatttttgtatgtcttgccatgttggccaggctggtctcgaactcctggcctcgggtgatctgccgatctcagcctcccaaagcgctaagattacaggcataagccaccatgcccagcctcctcttgcctatttcacaaagcgtgggctcttgaaaaagctgcacacccatcttcttttctccaattaatattagcagtgtccaggcgcagtgactcacacctagaatcccaacactttgggaggctgaagcaggagaattgcttgagcccaggggttcaagaccagcctgggcaacaaagtgagaccccatttctaaaaaaaagttaaaaattagccaggtgaagccaggcgcggtggctcacgcctgtaatcccagcactttgggaggctgaggcaggtggatcacgaggtcaggagatcaagaccatcctggttaacacagtgaaaccccatctctaataaaaatacaaaaaattagccaggcgtggtggcgggtgcccgtggtcccaactacacaggaggctgaggcaggagaatggcgtgaacccgggaggtggaggttgcagtgagctgagattgcgccattgcactccagcccgggcgacagagggagactctgtctcaacaacaacaacaaaaaaattagctagctgtgtgtgtgcgtgcctgtagtcccagctactctggaggctgaagtgggacgatcgcttgagcctgggaggtccagggtgcagtaagctgtgactgcaccactgcactccagccagggtgacagagagagaccctgtctctaaaacaaaacaaaacaaaacaacaacaacaaaaaaacaaacagcagcgagcaggaggcctaagaaaccaaaaatacaggttcctgaaaatcagtagatgagcctggctaagattttggtgaaactcgagtcctcttttggtgtttgctctacaaatccttgaacagggttggggaccaggtggcttctaagccatccttcatgctttggcctgtgctgcctggaggggactcagcttgtgacttctgcacacaccgatgaccatgcccctgcagccggcctggttcttagaacttgcctctcaggttggcatcagtgagggactggcttggtttggtgatgagatggaagttgctcataccctggaagctcctgtctggggtggctgctctctgatctcgccgtctatttgagataagtaactgagtagaggcgtaacaggtgtcccctctaacttgagcagggagcagcaggcccaggacagtgtccaagagcaggtgggcctgggagcagctcagggcactctctccccggtccctgacagaagatggagggagaggacactcaccgtttggtttacttgctccgtacgcaatcagcaagcaggaaaccgcgaagcaggcgctaaaaccaagcagaaacgcaatgttatttaccattatgactttattcagtgttattgttttgtttttgtttttggtttttggtttttcttgagacagagccttgctctgtcacccgggctggagtgcagtggcgcgatctcggctcactgcaacctccgcctcccaggttcaagcatttctcctgcctcagcctcccaagtagctgggatattacaggcgcccaccaccacgcgtggctaatttttttatttttagtggagacagggtttcaccatgttggccaggctggtctcgaactcctggcctcaggtgacccacccaactctgcctcccaaaaagctgggattaccagtgtaagccaccgtgcccagcccattttcatttatatttttgtatatgtattataaagcacattaagaatggcatagggggccgggagccactgcactccagctccagttgcttgggcaacaacagcaaaactccaactcaaaaggaaaaaaaaaaaaaaaagaatggcataggggccaggcacgatggctcacgcctgtaatcccagcactttgggaggccgaggcgggcagatcacaaggtcaggagatcgagaccatcctggctaacacagtgaaaccccgtctctactaaaaatacaaaaaattagccgggcgtggtggcaggcgcctgtggtcccagctactcgggaggctgaggcaggagaatagcgtgaacccgggaggcggagctcgcagtgagccgagatcgcgccgctgcactctagcctgggcgacagagggagactccatctcaataaataaataaataaataaataaataaataaatatgaaaaatataaaaattagctgggtgtggtggcaggcgcctgtaatcccagctactcgggagggtgagacaggagaattgcttgaactggggaggcagaggttgccgtgagccgagatcacgccactgcactccagcctgggcgacacagcaagactccgtcttgaaaaaaaaaaaaaaaaaaagagcacagatatacatcatttataattccatgtgcttattatattgggggtacgtgttgaaaatcttttttctggtggagctataaggtcaaacgggctgtggaaaccagtgttgttggttttttttctcatcagatggatactgtgccagcttcgtaacaaggtttgagggaagcatgtctcacacatgcgagggaaaccccaattatcatgcttatgaactacaaagggatgggaaacacatgttcttagtgacaagcagctccggtccctgggcggcctggagcctggagcttttcttattcggtactggagcacggcgaggaccacagtacctgctgattcggtggcggacggggtaggaactccattctggagggccttcagggagctccacagtacacctgatatcaggtacgaccaggatacccttctgtggggaactcagcccagggggtccacctgcccactccctgccccctaagggacccacactgacctgcccagcagcctgagcttcctcgggccatacttgtccatgacgatacccaggggcagggtgatggcactgagcagaaaggagcccacagtgaaggccaaatttagcatctcgtcctgggcctggcagctgagccagccgttcatccagctcacctcctcgtgccccggctctgctgtgccgcccactgtgccattggtgacattctctgtgtgaagagggaaggaaaccctgacctcagggtcatgacagggattcccaaagatcagaagggcaggtgcccattcagagtccccccactgggaatgccagggctggctggcggcctctcgagggctcaggctaccccgcagcaggcttggatggccatttggcccaagtcccctggagtgaaaatgtagaggttcttaacttttgtgggggccatggaccctttgaaaaatccaataaagacctccccagaaaatgcacaccaaggtttatccacagtttcaggagctttgtgtgtcccttgaagagcaacgaagcccaggctgagagtcccattcgagagcatccgccaccctagaacggcagacctcagggcccagccttggctgtggggccccaggctggtgagaaccttctcacggcagctatgtccgtggggacagactgcagccagtatggaggcagaacccagaccacttgggaagcacaagcactggtctcaccccaatagcctggttctcctctgtccatgtggggagactgcggcgcctccttcaatgggaagtccagctgccttctcaaacatagaacagatgccaccttctccccctgatattttctttttctttttttttttgaggcggagtctcactctgttgcccaggctggagtgcagtagcacgatctcggctcactgcaacctccgcctcccgggttcaagcaattctcctgcctcagcctcccgagtagctgggattacaggcacctgccaccgcgcccggctagtgtttgtatttttagtaaagatggggtttcatcatgttgcccaggctggtctcgaactcctgacctcaggtgatcctctcacctctgcctcccaaagtgctgggatcacaggcgtgagccgccacacccagccgatatgcacctttcttattttccttgccggggtcacagtggtgccatcccgtggccatgcctagacctcgctgggtgctgagtctggtgtgtttgccacacccagcccttaatggcccccttcaaagtccacccagcaccaaaacaacacagaaaggaagagaaaagtgctgtggcagctgaagatgggagggtggaggacgggctgggaacgtggctgaggagctctcctggccgggactgctagttaagagatgctgactaatcctgcagaaaacaggagccgactttgattagacatgaggtcacgctgggagagtcaaggaaacgctcttcttccggtaactgcctgccttccaattgcagccctctggcgccagggctgtagcgccgaggtttgcaaaagcttgctcaggcctctcggggttcctccaaggttactggaaaggatgcgcacaggtggactcgtgcttcatgccaacgtgtggccaaggagccccgccggggccgtgtggatgaagagcgtggaactggaatctggtttctagcttccagtgtttgattctccactttctacctgcatgaccttgctctagctcagtttccttgtccataacatggacatcatataatgataagatccacctcctagagtgtgggggaagatcaatgagaaaaattcagaaaaccttctggagctcacccaggcatagaaagcactcaataatgaatagctacaagttgctgctgttctcgtggttatcatgatcattgctgctattggaggctccggcggggaatcacggcaccatcagctggcacagagccggatgcagtggctgtggggagcacagtcccgtcagcgtgtgtggaagcgcaaagacatgtctaatcccccactgggctgtgagccccgaagggcagggcctgcactgtggtcacttctgtgtccccagtatctcacccaggtcttggcctacaatagctgtttactgaataaataaaaacaacagggccaggtgtggcggctcatgcctgtaatcccagcactttgggaggcagaggcgggtggatcgcccgaggtcaggagttcaagaccagcctggccaacatggtgaagccccgtctctactaaaaattcaaaaattagccaggcatggtggcgcatgcctgtaatcccagctactcaggaggctgaggcaagagaatcattgaacccggtaaacggaggctgcagtgagccaagatcacacaccactgcactccagcctgggcaaatagttagactctgtctcaaaaaaaacaaaaaacaaacaaacaaacaaacagaatcaggccgggtacagtggctcagtctgtaatcccagcccttcgggaggccaaggtgggtggatcacctaaggccaggagttcaagaccagcctggccaatatggtgaaaccccatctctactaaaaatacaaaaattagccgggcatggtgggcgtctataatcacagctactcgggaggctgagacaggagaattgcttgaagccgggaggcggaggttgtggtaagctgagatcacaccactgcactccagcctgggcaacagagtgagaccccgtctcgaaaaacaaaacagaacaaaacaaaacaaaaacaatggcaccagatcacaatggccaaaaagatcgagagaggaatcaacagaaccacgttgaatcgaggggggatttaaggagatcagagccacgaggttaaccatgtggagccacagaaatacaacgtcaccaaccagattcccacctcggccactttctctcggttttccaaaaagaagctctaccacacggtcagccaaacacatggcagacggggtcctcgagcccgtcagggtggagctcagagcggtcatgtacaccgccacagccgacaggcctgggccactcgcccatccacagtggggcagcttctggaaaggaggagctgctttgtgagttggtgttggtttcaaatgtcagctctgccagcagcaaaggaattggctctgaagtcagggaaagagggtctctacaaagcaacagccatttccaggttgacatgcagataggagcaaaccagcacagaggtgacagagaggatggatggagagagcacgccagggcccaggatgggtgacttgtggggacagtgactgcacaggggccgtggaataactgagggcttggggggctgcacgttctactgctgcaagcaggagccacggggacaaggaatggagtgggtgaggcagcactgcctgagtaaaggcaccagggacctccagttaccccagggaggaaccacagctgggtctctaaacccatgggttttctcatctagagccagaagataaaaatcccaaggctaggccaggcacggtggctcacgcctgtaatcccagcactttgggaggccgaggcaggcggaccacttgaggtcaggagtttgagaccagcctggccaacatggtgaaaccccatctctactacaaatacaaaaaaatttagccaggcttggtggcaggtacccgtaaccccaactactttggaggctgaggcaggagaatcgcttgaacccaggaggcagaggttgcagtgagccgagattgtgccactgcactccagcctgggccacagagtgagactctgtctccaaacacacaaacaaacaaacaaaagtcttaaattgattagagatctggtcacccctttaaccacatagggaagaggcaaggtcagggtagaggcaagggtatctgtccttcccatcttttaccctggagcgactacacacaggggcagggaccttgcacgtaggccaacagccttctcgtcttaaacaaatccctgccgatggggccaccaggccctctgcccggccgcctgcctccaggccgtcccgtccagcaacagaggcgcctggggccggggaggtgagcggcttctccttctgcttgtggagcaatttgagagtctccctcctgctggagggaaggaagcccttggtgagcccagaagctctgttgacagtaaacagcccacatgcacccagcagatgcccaaacagacacacccaggctgttcctctccctctggtcccacctgggccaccgtgggtcaggagagagacaaacagattaagcacccaggaagtgccaaggcgtggggtggccctctgctcccagcctggagcttgaccccgggccagcctgctctgctcacccccggccaggctgctctgctcctcacctgcacctgtttattaaacagatgcctcctctggggtggccagaagtggcccagcccagcctggccagagaaggtgaactgagaagacaggcaagagttggtgtggccagtgagtgccaagaacaggaacagggctgcttaggaggagacccagggccagggaggacgtacaccgttcagccccactcacagaagacgcacaagatctttacagaggaatcagggagaaaagagggtgctgtggccccccaggctcccctgaggcaaagaggagcctccccacaccccggggagacaaagggaggggggcctccaagatgatgcttgagggggccaagaagtacctggcttgaggtcccctctaaattcctgagctgcccccttccctgactagtcgctttccgagccccccctccagggtgcgggcccctggacagcccaccgatggcccctgcccaggatctcccgtctctcaaatccttagtctatccggcaacaggaagcagcatctcagtcctcagtccggcaggggagatgtaggtgagaggtcggctcagacacagagcaaacaacaggcaggagggcacggacaggcagaggccgtcctgggctgaccagggcctggcccctgagcagtggtcccagcagcggctgccgtgtgtgcaatgaaagtgtgtgccagctgccatgctcaacgggtgtgcccacgcccaccccatattccccacgaggatactgtcagagtgtccccgagggatgctcagagcaggtaagtcacttgcagaaggtctcatgggggtccctggggaagctgggcttgactccaggctgtcagaccccaaagctcccgctcttaccactcggtctgtgccgatgctggcctacctgggctagaggctcatatcccagagagaaaatgctgagagaacagagccgggaaaaggctgcccatgtgccggcaacaccaggaggccctgaatatcgcttggtgggaatgggactaagactctcccacgaggtccctgagagccagcctaagctggacaggaccttcatggacaccagaagccaggggtggccagtggatgtctgtgagggaaatgaggtcacgaaccaagaaggagggaggctggggcggtgggaagagccaaggccaccagctcttctctgagacgcatcctgaggctgccggccccagcctttaaaccttcttacccattgctatggaatttttaaaattccaaataaactgggggaaaagtttaaaagtcatatttatagcaataaaagtgaaaggctggatttaagaaagctatccggctgggcgcggtggctcacgcctgtaatcccagcattgtgggaggccgaggcgggtggatcacgaggtcaggagatcaagaccatcgtggctaacacggtgaaaccccgtctctactaaaaatacaaaaaaatttagccaggcgtggtggcgggcgcctgcagtcccagctactggggaggctgaggcaggagaatggcgtgaacccgggaggcggaggttgcggtgagccgagatcgcgccactgcactccagcctgggcgacagagcaagactctgtctcaaaaaaaaaaaaactatccacacttgcctgtgggtgtgaggagagactctaaaaagagaggcccttgagctgggcgcagtggctcacgcctgtaatcccagcactttgggaggccaaggctggtagatcacctgaggtcaggagtttgagaccagcctggccaacatggtgaaaccctgtctctactaaaaatacaaaaattagccgggtgtggtggtgggcacctgtaatcccagctatttgggaggctgaggcaggagaatcactttaacccgggagatggagtttgcggtgagctgagatcatgccattgtactccagcctgggcgacagagtgaaactccatctcaaaaaaataaaataaaataaaatacaaatacaaatacaaaaaattagccgggtatggtggcaggcgcctgtaatcccagctacttgggaggctgaggcaggaaaatcgctttaacccgagaggcagaggttacagtgagccgagactgcgccactgcactccagcctgggcgacaagagtgaaactccgttccctcctccccatcccccaagaaaagaggtcctcgaggcagcagagaaatctcctgtccacatctgcagcttcactcagcccgtggggatcaagcctgggcctgcttccccaaggtgggcggcagcccctctgcccttgcagcgatctctgtgccagggcgagctcgcagggacctctgtgccagggtgagaggctctctcccaccaccacaggtggagaaactgcagaggtcaagagcatacaactggggtcggccttcatgcccatggtcagactgtgggtgacttcctcaggcagaggccgtgatgacttctggtttctatgccacccaaacataccagcatgtggcaagccctcagcaattcacacaagcctctaacaggggaattggatggtcgccctcctctatctccctggcttcctcctgtcttgggaataaaattcagtttccccgaatggcctcccagtccctgcagcccccgccccttcccacttctctcctctcctccagggtgtaccctcctctcctccaggctgtaccctcctctcctccagggcgtaccctcctctcctccagggcgtatcctcctctcctccaggctgtaccctcctctcctccaggctgtaccctcctctcctccaggctgtaccctcctctcctccaggctgtaccctcctctcctccaggctgtaccctcctctcctccagggtgtaccctcctctcctccaggctgtaccctcctctcctccagggtgtaccctcctctcctccagggtgtaccctcctctcctgaatcacccctcctcaacctccaggcttccacctgaaccgcagagaggccctcccacccagcaggagccacatctccgctgctgttctagctcctggcgccctgctttcttgggggcccgaccaccccctggaattatacgggttacacaggtatgcgtgtgatgacttgtttcctctgcacccagcacggcaccttcgtcaatgtttactgaatgtttaggttacaagaaagaggggattaacgatccacatgtaggcctggagcggtggctcacgcctataatcccagcaatgtgggagcccgaggtgggtggatcgactgagcccaggagttcaagaccagcctgggcaacatggtgaaacccctatctctacaaaacatttaaaaattaactgggtatggtggcttacacctgtagtcccagcactttgggaggctgaggctggtggatcacttgagcccaggagttttgagaccagcctgagcaacgtgatgaaaccctcatctctacaaaaaatttgaccgggcgtggtggctcacacctgtaatcccagtgctttgggaggccaaggcgggtggatcacctgaggtcaggagttcgagaccagccaggccaacatggtaaaaccacatctctactaaaaaatacaaaaattagccgggcgtggtggtgggcacctgtaatcccaaaaacaaaaacaaaaaactaactgggtttgatggctcatgcttgcaggcccagcactttggaaggctgaggcaggaggatcgcttgagcccaggagtttgagaccagcctaggcaacatggcgagaccctgtctctacaaaaaatacaaaaattagctgagtatggtggcgcacacttgtagtcccagctactgctactcgggaggctgaggcgggaggattgcttgagcccaggagtcaaggccgcagtgagctgtgattgcaacactacattccagactgggcaacagagcgagaccctgtctcaaataaaaaaaaaccatccacaggtagccgcagccccccaggctgaccctgaccctgttgaagcgggggccactggacaacagagaaaacgaagaaagagctcaggagtgggccgtcacgttgccatcccagaggccaagaggacacagctccaggaagccccgtgcttctcgggctgagaacccaactggtctcctgccctcaccagggggacgagggaggcatccagcagccaacacctggaggacgttgtgcaaaacccattgccaacttcccgcacccaggtccccaaacccagcctgccacgtctcccagcaggcaaggaagaacaaactgcggggcagccgagaaatgagctgtttccttccttctgccacctcaccaggctggaacccaacacggtgtctgtggcgagattctggctggagtcgtaagaaagagttctaagaacctttcaacaggttcaggcaaattttctttagagaacaaactaaagcatcgtcctagagtgacacgaagctgacaaatttgcatctcaatcagccggacactgctcaggctttcacaagtctaattcaataaattcaaaaatggcctatctgcttctctgcaattcagccatgcaccaagtttgaaaatgttagactgaagcagaaaccttcaccctaacttcgccaggcactcccagacgagccaaatgcggggatttctggcctgaaagaaaactggtgatgcagactccaagaatcaaggagcagtgtgaccagagagataagctgtgtggaatcagcagccttcccgcccagaacgtgggctcagcatgtttgccagataataagaaaaaccaaaattggaggcaggagcaaaagttcgggataagaagttgatgttcaacccacaatcctgacccttcaccttcactttggtttagtggagttacctgtcaagtctgcccagggcttaaaacaccaactcagcactgcgctggcacaatctctgggactcctcccacttagacagaggaggaagctgaggttgaggcaggaatgaaaggaccagacccaattctgccaaaaccatacaatcaattaaatccgtggacattctattaaaaaaaaacaaaaaacaaaaaacaaacaaaaaacacctagaatctgaccttccgacatcatggtgggttaaaaaaaaaacacacaaaaaaacacctgcccacaacagttctctggtctgggtgagacactaaaagctttctctggggacgatgactttttttctgctttttttttttttttttaaaccctgtgtccagcctgaaagagcccaccagggaggcaagcaggaagggtcacgatctctaaggggggagagaggaaaggagaggaagaagtaaacactccaacctgtgcctttcggggacaggcattaatctcctaacaactcttggccaaagcagaaagcttgttcagggaacaaggtctgactcttcccaactcccaagatttcttgctgatgtggggaaagacctgccaagaacccttaggctattaggaaatatttttgagtggctaaaggctaaaggttagttataaatgatatactttctgtcctctccccgcggcctctgcattctcctgctttctcctgccctgaacctctccagctaagcctccctccctagagactgggacacacaggaatctccggggcagatcagagaagggaaacagggaggcttccacaaaggattacacccagcatgagctggtccaaagctttctcttcctgcaaagagctctagaaagaaaaggcctgctgctggggattcaggaagtcaaacctgggctacctccatctaagggcactctagcactggcgacagggattatgtgagctcagctattatgcagctaccgttgggatcaaggagaaggcagagggaaaatttcctgtcaaggttgcctaagaaggagggtaggaggctagaggctgggggctgctgtggccctcctgtggggctgaatttactgccctgtagtcatcaggaccctccaacagggtatgaaggtgtgaaggtaagtgtgtgttgggtggtgcagatgtcatgtagagaagcatcctcagcctgccttcagcaattccagtgacaaggcaaagaggagagaacaaccctagcatcatttccataaacgttcctttcttctcttccccttcatccccatggggttggaaagccacggagatgtcctcagagcccgtgggggaaatgtcctttggagaatcataaggcagcaaaaatagacaagaaattgtgtccagcaagcacttaggagactccacaatggcctgaggaacgtctagattctagatgagccctccctggggtggaggcaaggccacttcctctcctgctgcaccccagccccttaatctggagttcctctttctcacaagcagacagcaacatgtttactaccagccaagctatgttccagggctgggaggagaggagagcagtccagcactgttcgtagcgggtggaaggaacaccctggacagcaggtggggttctgggtggatggcaggcccaggctctgcggccttgcgcaagacagatcgctctgagcctcgatgtcttcgtccacaaaacaggggcaatgacaagtacccggcagggctgggtgaggatcagatgggccttctgataccctagaggcactgggcaatgcggtgctgtggctcgctaggtcttcgcccccatcccgccccctcccaaagccccagctccaggagccccccgcaaccccaggcgcttgtctcacctggctcggtacacaggtaggagtaaaagccctctgacttgagcatgatgagcagcgagccccagcccaggaggactgccgagaagaggaggttctccagcacggccgtgcaggccatccaccagcggcgccgatgggcagtggccagggtgggcgccatggtgcggcgcggcgcggctccggctccggctccggctctgcaccacctgcgcacagaactcggcgtcagcggccggcccttgcccagcccctgcggccgcccccagcagccccgaccgctgccgcagggctcgggattgccacccctccccggccgcggcggccggtgcgcgcagcagaggaagcgaaccccagccctgcccggacctgggacaccccgagcccgcggccggctcgtaccgctgccctccgctacgacagagccgccccggccaggcagggagacgtctcccgcagctcactccgaggtaaactgaggcatggaggcaagaaggggctaacgcatgctcagggccgtggaactagtcctggcctgcagcaggactgacatcgcctggggccagcatggaacgcagcgtgaggtgggcaggggcagatccgagggctgcctctcccagggaccctgacaggtgccctcccgcccgcgcccgagacccttccccagagctggtttcttcaaccacaagatcagcgcccagacctacggaacggcccgccccggcgcgctcattggccggacggcgcaggaactgccgcgccattggccgccgtctaggtcgctaggcgctgcggccacgcgaacccagcgtgggagacgaggagccggttcaaaccggtggcgcgagccagccgcgcgacccccatctcgggcgttcccccggcaactcgcccgtttccatggcctcggacccccgcgcctccattccccagcccgcatctgttcgtcatctcttccctggcggcccctcatcgctccatctctctcctcgttcccacgttttctccctacgccccttcggcggccgcttctgcccccgcgccctcgccccggccgcgatcccctccctgctgcagctcacccggctcctccggcgtgtgtcgggcccgcccggcgccttttctgccctcttttattccagcccttttattccgaccccaagaagaaaacactgccgcccgctgattggctgagcggggctggaaacaggcgtcgaccaatcagcagccagccccccgcccgccccgccgcgagcagaagccggttccggccggactcggagacaaacaagagagatgggggacgggaggggcctgggcgctgcgggccgggcctcggctttgcagccttcaacccgagtcacagcgcggccgggaatccccggcgacatcgccccgcggcctctccagcggcctgaccctgcgaggctggggctccggctccgcgtcccggcccccagcggactccccccagaagccgccgggccaccagcgcccccagccgggctctcccgcggccgccccgccgtccccagctgccccctgcgcgcgggtcaccacgcccagatgcgccggctccgcacggtggttccactctcgaatccccaccccgcctcctccccacgcagcgccgccgtccccgccgcctcgggctttgggtcctggttcctcgctcccccgccccggtggttcccgtcccggcgtattcggggcctgggatcccggacccggtccagccgtggcgccccccgctgatgcaccgaccccttcccctctccccggtggcgtctgcccggtccctggaagttggcccttggaaatctgcaaggggatttggggctggtctgtcccgtcctaggatggggtctcctgagctccccccatcagactgacctttctccgcccgtgttcacgcactgctcggtcctccggggaccctccacccttgatcgtcatctgggtgctccctgcccgcgctggccaccttcaccccgttccccgtccctttcagggaaggtcccctctgcagggcgatgctacgggccacgtccgccagctggtacaagctagggagggttcgagggggctccgggtccccgtctgataagcccgggctccgaaagctcagctccccgtcttcgtcccccggattcgaggcactaacccgacccgggaagaccctctgactgccccagaatcgccttggtcaccctggctcgctccggggggctggcttagcaccccagggctgccgcgcggtgtccacgtctggaatcccagcggtttgggaggctaaggtcggagggccacttggggacaggagtttgagaccagcctgggcagcatggcgagaaccatctctaccaaaataaaaaccaaaaataaaaccccaccaccaccccagggctgtgggagccccaaacgcctcttgctccacctgccccagtccgagtgtgccccctactgtctagaatccgcccgggccacctggcgagggcaacctcccccagacaacgcttggagctgtcagcctgctggggggcggctccagctggtagcctacccggttcctcaccctgtggaacccttcccactcccaaggtttcaactgccatctgaaaaatctctttcttcacccttccctcctctttgagcagcctgacggcgctgcagggctcaaacatgcctcaaatatcccccagaactgtcctccacattttctctcagataaccatactactactgtctactgaagttagataccaagaaccctgtcttttttctttttctttttttttttttttttttgagacaggatctcaggcacccagactgctggagtgtggtggcatgatcatagctcactgcagcctcgacctcctgggcttaggtgatcctcctgcctcagcctcccaagtagctgggaccacaggtgcatgctaccacacttggctaatttttgtattttttgtacagatagggtcttgccctgttgcccaggctggtcttgaagtcttgggctcaagtgatcctcccacctcagcctcccaaagtgcagggattacaggcatgactcacagtgccctgctgagaaccatcctttcatcagacatttgttaggcagtcgctgtgattctgcctctccctcaccgcatccccatcaaactgatacagctgtatctcctacatatttacctaatcggtccatctgtgcccttaggcccgcaactactgttgttgagccaccttcagatttcagttcctcaaatccagcccccatctcatcccagggcactaagggaaatgtaaatgtgacttctgccaaaatccttcagaaactattatttgtaaaacaggataaagttccagttcctggctgggcacggtggctcacacctgtaataccagcacttcgggaggctgaggcgggcagatcacttgaggtcaggagttaaagaccagcctggccaacatggtgaaaccctgtctctactaaaaatacaaaaatggctgggcgcggtggctcacgcctgtaatcccagcactttgggaggccgaggtgggcagatcacaagatcaggagtacgataccagtctggccaagatggtgaaaccctgtctctactaaagaaacaaaaaattagctgggtgtggtggcgcacacctgtaatcccggctactctggaggctgaggcaggagaatcacttgaacctgggaggcggaagttgaagtgagccgagatcgtgccactgcactccagcctgggcaacaagagcgaaactttgtctgaaaagaaaaaaaaaaaaaaagatctgggtgatgtggcacacgcctgtaatcccagctacctgggaggctgaggcaggagaattgcttgagctggggaggcagaggttgcggtgagcagagattgtgccactgtactccagcctgggcaacaaagcgagactccgtctcaaaaaaataaacaaaatttaaaagttccagttccccaatttgacccacacaggctcctccctctccctccctctgaaggacatctgacctgcctggtccccgatgctccagtcacatggaattgcctgtggtttctgcacctgctgttctctctcctctagctcgcgacatagcctcattttggacggcacctccgctgggaagccttccctaaccactccccattaatactgttcactttatttgtccactgctggcattgttttataattagctattcgtctgtttgccttcctctctaattgactatgaactctttgggggcaggacggtgtcttattcaactttgtatgaccagcccttgatagagaagcaagcacaaagcagttgcacaatatgagtttgtggaatgaaaacatgaactcctgaaaaggggcaaatggccaggtgcggtggctcacacctggaatcccagcactttgggaggctgaggtgggtggatcacctgaggtcaggagttcgagaccagcctggccaacatggcaaaaccccatctctacaaaaagtacaaaaattagctgggcatggtggtgggcgcctgtaattccagctactcaggaggctgaggcacaagaatggcttgaacctgggaggcggaggttgcagtgagccaagacggaaaagaaacaaccttagaatactcatagaactttaaattgtaatgagatataattgttgatggctaaacacacacacaaaaattatatatactttttagaagctttagtggctgggcacagtggctcacacctgtaatctcggcactttaggaggccaaggtgggaagatcttctgaggtcaggagttcgagagcaacctggccaacatggcaaaactccatctctactaaaaatgcaaaaaaattagctgcacgtggtggcatgcgcctgtagtcccggctactcgagaggctgaggcaggagaatcgcttgaacctaggaggccgaggttgcagtgagctgagatcgtgccattgcactccagcctgggcaacaagagtgaaactccatctcaaaaaataaataaataaataaatatggacaaagttgtatactatgtcattgcttattgtatcaaaacagatcagaacaacccaaccttccattggcgggggaatgatttaaataattgtgctagatggaatctcatgtagtcattttttaaataaagagagttagctttacatttatggacattgaactatatccaggatatgtcgttaagtaaaaaagcaagttgaggctggccgcggtggctcacgcttgtaatcccagcacttcgggagaccaaggcgggtcaggagttcgagaacagcctggccaacatggtgaaaccccatctctactaatacaaaaattagctgggtgtggtggcacacacctgtaattgcagctactcagcaggctgaggcaggagaatcgcttgaacccgggaggcagaggttgcagtgagctgagattgcaccactgcactccagcctgggcaacagagcaaaacttcgtctcaaaaagaaaaaaaaaaaaaaaaaaagaagctgaggaacagtatgcttagtatgctaaaattttttgtttaaaatatttgttgacatgtacacagaaaaacatctgaaagaaagcacctcaactgttgatgagactctctgagcactgagatagaaggggctgcccctggccgggcgcggtggctcatgcctataatcccaacactctgggaggccgaagctgtggagcccttgagtttgggagttcaagaccagcctggccaacatggtgaaaccctgtctccaccaaaaaatacaaaaattagccgggcatggtggcgggcgcttgtaatcccagccactcaggaggctgaggcaggagaatcgcttgaaccggggagacagaggtggcagtgagccgagatcataccactgcactccggcctgggtgacagactgagactccatcttaaaaaaaaaaaaaataaagctcggggggagggttgccccttttcttttctgactaggtaatatgtgagcaaagaattcaaacaagaccaaaaagctgccagggaaaagtagattctacctctctcttgacccacagacgcctctggggagaaaggaaatctccgttttactttatacatgtctgtaatgttagtactttttatttttttaacaaagatcattgctttttattatactttatcaaattcaatctagtaacaaaagtaaaaaagaatgttcactgtagaaaatttgcaaactatacaaaagtttcagaagaaaataaatatcacctacaatctcatcttccagaggaaaaaaccatttagtgcctttcccttgaatctgtttttatacacatacatcctttttaaaaagttcatagaccaggcgtggtggctcatgcctgtcatcccagcactttgggaggccgaggcaggtggatcacgaggtcaggagatcgagaccatcctggctaacatggtgaaaccctgtctctattaaatatacaaaaaaattagccaagcgtggtggagggcacctgtagtcccagctactcgggaggctgaggcaggagaagggcgtgaacccgggaggcagagcttgcagtgagccgagatcgcaccactgcactccagcctgggggacagagggagattctgtctcaaaaaaaaaaaaaaaaatttgtttagccaatcttttatcagcaaacatgtaggttgtttgctatttcagaaaaatgttttgcacgtgaaagaaagaatagcccttatgaggcacacagggtccaggacagcagagcaaaagtccctgcaggcaacccttcctgaccccatcctacagggtctctgcccaggccttcctgggcccctccgggagcactgccaggggcctgggccaactggcctggaagccttgccttttccctgtggaggcgcagaggctctggtttgtctgtcctggccccgggatcattttccagcacacagcacagtctagtccatccactctccccactccccaaattcaaggtcatcagggttctggtggcctggagatgggtacaacattctcatactcaggttcctcctgcctttcctcttcagcctgcttctggggatcctgttctggggagccacagccagagactggctcctgggctctccttgaactctcggtgccagcccccagcccccggaccgcttcctctggtctgactgccataggccctgtggccccaggaagcccagcttttggggctgagttggggctctggccgacagagccagaggcaaggccagggctgccctttttccgattcagggcctggcgcggaggcttagggatggccctcttgaccttggcttccgcctggcctttctggaagctaccaaaatggcggaagacagagcggacagggccttcggatccgcggggcttccctgccagcatgtagatcgtggtcacagggcccgagctctcctggacgctgccctcaatggcttccacgtgctcagccactgtccggccaccaagtgggggccgccggtggccagtggctgaatccccgggactggcagccgccggaaaggactcgggggcttctgcttcctctgggcctgtggactcttcggcttcccggccctcaggacccgactgcgccccccgggagagcctcttgggctttcggagcgggctggagagctcccctgagcttcggcgactctgtggtgcaaacttggtaccttccgcgaaggagaccgatggccgcttggcccgagctaggctggaggtgcgcgggatggcgaatggcgtggaggcgtcctcagggggcgggaaagcacctgcagccaggctggcctctgacgaccctgcctgggccacagggaccatccctggcagaggagacagaagagcttggctggagctgaactggccaccccaatgcatcctacccacagctcagcatcttccaggaggcctcaaaaatagggcaaggaagagggcaaggatgaggagagtggcagaaggaccaattcaggtagacactgttacttctacactttttttttttttaattgtagagatggggtctcactatgttggccaggctggtatcaaacccctggcctcaagcagtcctcccgcctcagcctcccaaagtgctgggatcacaggtgtgagtcaccacacctggtctctatactcttttctcaccacctctccctactttgaaatactgtcacactcttaccaagctaaaactctttcgatggcacacagccacatccctctcacctctgggcctttgtgtatgctgttccatcttcctgaaacaccattccctcctctccctgactttcacttggccaactcctactgattctgctagactcgactgggatgccacacacatcgtccctgaccccagtcaccccaacatggctagcaaatgagtccctacttgtatgtcccccatggaaacacatatcactgtgtcctgtcattgtctgatgactgcccatctgactctaagcctggtgaggataggaatctgtcttgttatctcttgcatgcccggagccaagaacagtgactaacacaaaatgggcccttaataactgtttgctggccaggcgcagtggctcatgcctgtaatcccagcactctgggaggctgaggcgggtggatcacgatcctggctaacacggtgaaacccggtctctactaaaatataaaaattagccgtgtgtggtggtgcacgcctgtaatcccagctatttgggaggctgaggcaggggaatcacttgaacccgggaggcagaggttgcagtgagctgagatcgcaccactgcactccagcctggcgacagagcaagacccagtctcaaaaaaaaataaaaataaataactttgctggaggactaaagagggggtcgtggtgggcagggctgctcaggggctatgtgggctgttggggggctaccttcttggggtggcacacagtaggcaggaacctcatctgcctctccagactcaggatcggatgagaaggagtcatcagtggcccagccggcagagggcggctcgatgaagctgtggttgaaggggacctccgggtcgtgatgtgagactgtagagactccagatcaggcgcctgcaggacctgatgcaaagccctgtccaatcccagaccccggcccccagcgcccactgacctgtcacccagggtagcttgtgggagctgagggaacggcagggcagcgtggagcccaagctggtcagtgtcccccagacctgcagcttcatcctggacacggtagctccatctctcgctggcctgagggaggagggtagggacactggtcagtacatgagacccacggtgacctgggtcaccttggcagggtgtgacagggtgactgcctctacttcagtggcttcagtggctctctattgactacagaataaaatccaaatgattgagcccacaattcaggcctgccacagaacaaagagtggctctagagtcagacagccgagtaacaactctggttcacacttcacctccctaggcctcagtttccgcatctgtaaaacagatcctatctatctatctatctatctatctatctatctatctatctatatctatccatctatctatcatctatctgagctttttgcaggacctggcaggtctttgttattatcatcctagctgagcctcagctcacgtttctctctctctctctctctctatttttgggacagagtctcgcttttgttgcccaggctggagtgcagtggtacgatcttggctcaccgcaaccttcgcctcctggattcaagtgattctcctgcctcagcctcctgagtagctgggattacaggcgtgcaccaccacacccggctaattttgtatttttagtagagacggggtttcaccatgttggccaggctggtcttgaactcctgacctcaggtgatccactcaccttggcctcccaaagtgctgggattacaggcgtgagtcactgcgcccggcgcacctgtctcaaatgacaccccctccaggaagccttcccttgttcccactctgctctacccccacatgtggaggagactgctctgctcttcactgttcctccaacagcctttgcacctgtcctcgtgtccctgcgaggggcttcttcccaccctgggctctatgccctgggccaggggcaactgtatctgctcctctgtgaatgccgcacaagcacagaggaggatgtgctattggactagggcaggaactagtaagagagcaccagacaaagagtccaaaaaggtggagaggggcttcctgtgtgccagtaccaactagatcaccttgggcctcaatgtcctctgggaattgaggacatttatcctcccggccccacactccctgttccaaacctccacgctgctgtgagtctcaaaggagcctggaatgtgacgaggtttcataaaggaacaaagctctgcgtaagccccctgcgcgggccccaccagcccaacccttcctcccctctccgtctctcaggcagctacactctctgctaaaccactgcacagacattgatgtctctttccttcgtgggccatctgaggcctggtctctttccctcctggcccagagccgggctgctccttccgtggtcccagccctcctcctctggtccccgccggtgtcagctttctgcctcccgctgcaggctccggttcgccagcctggtgcccatgcaactcagaaacttcctcattgaaggcttccgaggagggcaggcagctgacccggtgtctccagtgtctccaggccacgggcactgccaactacctccatcacctctgacctacgtgggcgacaaggccagccctccccacccccatcacctctgacccacgggggcgacaaggccagccctccccacccccatcacctctgacccacgtgggcaacaaggccagccctccccaccccacaaggaaaccagatgcccccctgctcccaccctgtggcctgagctgtgtggggaagggacgggctggcgttcacctgtccttgaggtctgatcggggggcccagcagcagcaggcacagcaggcaaggcccaggaagagcagcagcagaggcacaaggctgcccgcgatgagggcagtgtcccgactgccagagcctgggggagccagaaacgggggatattcaggccttcctgtctcctacacatcctgtctttgctctgagttgcctgctacccagaagcttcttcctgggggtcactccctgcctccgggcagcccctctgctggcgtgtcccctccacaggttcttgcccctgaggccatgtcagtgtccagccaccccgctgcccatttcacggctctagcctggtttcgcaggggcgggggctctgtcacatcttcagggggccccagagcatccacacagagctcaggtataaagaatgtctctgggccgggcacagtggctcacgtctgtaatcccagcactttgggaggccgaggtgggcagatcacctgaggtcaggagcttgagaccagcctggccaacatggtgaaaccctgtctctactaaaatataaaaattagccaggcatggaggcgtgcgcctgtaatcccagctactcgagaggctgagatgggagaatggcttgaacctgggaggtggaggttgcagtgagctgacatcacaccactgcactctggcctgggtgacagagcaagacctcgtcttaagggaaaaaaaaaaaaaaaaaagaatatctctgaagtgggcccagactccctggtgaggaacttgccctggagcccatgtgaagggcccgcctttccctggctactgcaccccgcagccttcttccaccttacctggctggcaggacccagagacagggtggcagagtccctctgggcattcacaaggaactgagcagttgtttccatggaaaccggctgggcaggaggcgttgcagctatggagtgacatggagaggcaggctgagggctgggtgaagtgggggaggcaggcaggagacgggcagggagatttctgggcactgtccagggaagttcaggaaatgctgcacagagccctgacctaggcccctggcactctcccgcccccgggatccccatccttacctgggcccccagtagccggcactgcagacacagtcccctgtcacagtatcacaggacccctgaacacaggtggggcaggtagagccacagtcttccccaaaggtaccagtggggcaggggtcttcacacctggggtgaggcaagactcggggaaggggagaccaaggcaggcctggcccccactgtggggccccacccctccgccccacgctcctggactcaaggacccaactggccactcctcagcagtgaagctcaggtgcaaatagggccttgaacttggggccaaatccagcaggtgacagactacaagtccccagagggcgaggagggcaggaagcctcagaggggagggagctgggatcctgcccaggcccccccagaacccactgctctcccccagtcttcaacaggagggaggcccctggggccgcatgaacctgtgtgtcggggagggtggtgctctcggagagagccgctgagctgagggtcctgggggaaggtgtaccccaccctgaacagaatggtgccctcacctgggccccagccagccagggtcacagcgctgacagtggccagtatctggctcacaggcctccccatgtcggcagtgagggcactgctgttcgcagctctcgccaaaggtgccaggcaggcagggctgctggcactgggtcccgttccagcccggctcgcaggactcacagctgcctgtgtctggagagcacggctcattgtgtttgcagcggccacagctgggaagagaagggcttcgtgggaacagtgggggtggatggatggagcgcccaccccctcctacccctgtactccacgcaggccttcgggggccctggagagtgttcgggtcccacctgggtcaggcaggtttgagcctcagtttccccacgttgtacaatgaggacaaatgagggctcttacaggatcccatccctttccttccaggcatctgctctgtgaccgtctttccctgggtcccaggaccatcaggagccagcagcccagccagggcaggcgagtcaccaccaagctctgagtcccatttgcgaggtctgccaggccttccctcctgctcttttcacttttcctttttccacactgagccgtccccaggtctggcatgaatgggactcagtagtgtcttctaccccatcacacgaaatgcaaaaaatgtaaagtgttttcacccaggggtcctcaaaccctgggccatggactggtactagtccgtggcatgttaggaactgggcgacagcgtagagatgaccagcaggggagcctgaccgcctgagctccgctgccagccagatcagtggtggcctcagattctcataggagcgccagtcctattgtgaactgcgcacgggagggtccaggttccatgctctttacgaggatctaatgcctgatgatctgtcactgtctcccatcacccccagatgggaccctcgagctgcgggaaagcaagctcagggctcccactgattctatattatggtgagtcatattattatttcattatagattacagtgtaataatagaaaaattgtctgccatgaaaccagtccctggtgccaaaaggttggagaccactgttgtcaccaatataatttcacatttgccatatcttaatttcccattgatgcctaatagttacctgaagtttctccctcagatgcttaactagctgggatcatatacttgggtcagacccattagtaggggagaagaagggcagtttataaaagccatttagctgatcctgaccagcatttttatttcttattttattttattattattttcttcaagactgagtctcactctgtcgcccaggctggcgtgcagtggcgcgatcttggctcactgcaacctccgcctcccgggttcaagtgattctcctgcctcagcctcccaagtagctgggattacaggcgcccaacaccatgcccggctaatttttgtatttttagtagagacgaggtttcaccatgttagccaggctggtctcgaactcctgacctcaggtgatccgcccgcctcggcctctcaaagtgctgggattacaggcgtgagccaccgcgcccagccagggatgaaatttcttactgtgagtgcagccagtcaaagtttgaaagccactgagccctaaagggaccttgctcaggacccttggtcactcgatccacttatttattattttttttgtaagaaaccatttttttaattttctttttttaaatatatttatatatatttttttattattatactttaagttttagggtacatgtgcacattgtgcaggttagttacatacgtatacatgtgccatgttggtgtgctgcacccactagctcgtcatctagcattaagtatatctgccaatgctatccctcccccctccccccaccccacaacagtccccagagtgtgatattccccttcctgtgtccatgtgattccattgttcaactcccacctatgagtgagaatatgcggtgtttggttttttgttctcgcgatagtttactgagaatgatgatttccaatttcttccatgtccctacaaaggacatgaactcatcattttttatggctgcatagtattccatggtgtatatgtgccacattttcttaacccagtctatcattgttggactcgatccacttattacctacatatggcttgctagcagtgctagtatattttgcacagcagtaatcaatgaaatgagcaggtgaggctggacctggggcaacaaagcgtttttaaaagtttttgttttgttttgtttgagacggagtcttgctctctggcccaggctggagtgcagtggtgcgacctcggctcactgcaacctccgcctccagggctcaagcgattctcctgtctcagcctaccgaatacctgggactacaggcgcagcccggctaatttttgtgtttttagtagagacgaggtttcagcatgttggccaggatggtctcgaactcctgacctcaggtgatgcacccgcctcagcctcccaaagtgctgggattacaggtgtgagccaccccacctatccgacttttcccctttctcgttcctctgctttgtatgttttttgagaggagcaccgcgaagccctgacccctcctcccggcgccccgccgcggccacctgtctccgctccgccccgcccgctcacaggtctccgcgcagcctcgctcacctgtgtccgcctccgccccctcccccgaccgctcacctgtgcccgccccgcccccaccctgcccgctcaccagtttccaccccgccccctccccgcccaccggtgtccgccccgcccaccggtgcccgccccgcccaccggtgtccgccccgcccaccggtgtccgccccgcccacctgtcttcgccccgccccctgtctccgccccgcccccctgtctccgccccgccccgcctgctcacttgtgtccgcccccgccccgccagcccacctgtccccgccccgcccgctcacctgtgtgcgcactgcaccccgtggctgcctgccgggcagggcagctcgcagcgcgctccgcggaagccgggcgggcaggtgcactcgccggaggcggcgctgcagcggccccgcacacactcgcactgctgctggcattcgggaccccaccagcccggccggcaggcgcagcggccggagtcctgctcgcacggggagccgtggcagttgcagcggaagctgcagcggcgcccccaccagcccggcttgcacacgcaggcgcccgtggcctgctcgcagcgcgccgccgcggtgttgcactggcacgggcggcggcacgtggacgaccaccagccgggttcgcagtggcacacgccggtcgcggggtcgcagcgcccgtgggggccgcaggcgcacgggaactcgcagcgggctccccagcggtcggcctggcactggcacgcgcccgtggctggctcgcactggccgtgcgggtggcaggggcagctctcacggcagtcggggccccagtactggcccgggcagcctgcgggggtggggacgggaggggtcagcgggctcagggccgcgcgcagacccttaccctgcgtccccttcctcaaggaaaaggggcgctgggcccatcctccaagagccggggacagaccctcagaacatccggcagcctgtcctgggcaacactcacttcctgctccgctctgacctacagaaaacccttagccattagtgggaggctcagcctgccacttcacattccagaacacactcagagatcctgagtgggcaggggacttgcccagagcgtggcaccgaggttggtgggccttcctccatgcctgctcctccctgccgagatggatctctgctgggctggaggagagctggctttctcctgatctcaggcctggatactgcccgccagggtgtcgggagaagccacctttcccctagtgattccttgattcctgatgcccaccctctggctctcctgcttcccaacccctttcccttccctctctttctgccagagagggcagagagcccagccaggggcccccttccatccactgcccatgtataaggtatatgtgggaaaggcaagtaatacactcattttacaatgaaggggaatcacaggttttctgagaagtggaagaggaagatgctcaggtgggcagtgctttgtggatgtgggtaaaaacccggtgactcaggtcatctcccgggagtgtgtgtcacttcctgtctctggaccgcaattcctcagtgaagctgggggggattctggccctgctgtcctgaggctgcatggctacctgcctcgcctgctcccacaccactgcccccgtacccagctctgcccagcaacttcatctggcccttgagactcacgggagctgcagtgggccccaaagaatccaggcttgcatcgacagaggcccggcttcacacacacctcgtctttctggcaggcgtccggcccctcacagatggctgaaagacaccccacccaggttggaaagacgggagcaggaccaggggacacccctgccctctcactggctccaggggccatgcctcctcaagaggtgccccttcaggcctgggggtgcgtcacaggagaaaccctgactcctggtatcaggaggggcaggccccatggggtaggaaggaagggttgtcactgggctacggcctcccttctccttggctgagggtctgtcctggctactcacggatggtgcattcttgatccttctgcctccagcctgcgcagcactgcagctcagcagaggggctgtggggcaaaaaggggtcagccggacatggtggggggtgcagcctggccctgaggaaggtggatcactgtctctggctgcagtgggggaggctgccttagccccctggggaggcctaatggatctttacagctagggtccccagcccctcccctctccttccctgacccttccaccatctgccctggctggccactacctgccagaccgccatcagcagtcccttcctttcagcctaagcccccttcctagtctcctccttcccctaacggcctcaacaccggttcagccacccgcatcagactcccacgagacccacctgctggccacacgcatcagactcccacgagacccacctgctggccacacagacgtgctgccctttggggtccagctcggacccctgagtcccccgagtccagagcagcagcagcgggagcagcagccccagccccatggcaggcagctcggtgggagcgctcgggttcgtctggcccccacagctcccaaccccctccctgcttcctctcagggcttttcctgaggaaaccaggccggaggggcgggctgccacgaggcacctccctgagagggagggggtggctggaaagactgacactcaaaaaaagaaagggaaagaaaggcaatggcagggctgactggcctgggcctggaagggccagaagaatgaagttgcaggtccctgggtgccggggccagggaagggggtggactgaggctgggagccacggctttccatcaggccacactcccaaagcaaggcctgagctgcaagaagccaccccacccagtgactgagcaaggagaccagcgaggacccctcagcctgcctctgctcctggcagggttgggaggtggcacagacatggacagacaggcgaggaacagtttctgtgtattacgggcagttctttattacatgagctcaggccgtctgcacaaagccctgggagctaggcagtcagctctcatttcatggatggggaaactgagactcagagaggcactcttatatctggccccagaggctcggtacagagacgtagagagggaggcgggctgagaccccgtcctgccctgatgcaggccaggattggggcagacccctggcgagggctgtgaaggcgggagccctgtcctcatttgaggccacacatccttccacagccagacccctaagtcaggcctctggggcggctgaggcccccagacaaaggtgttcgtggagggcagaacagggcggatcaggagctggagactgtggttgggcctcctcttctccccctagcttgctgggtgcagggctgctggtctcatcctcagaggattcagctttaccccgataccataggccaaagctggagagagacagccagaggcactttgagccaggaagccagagaggtcaaggatatgggtgagggcaggggatggtgagaaaaggggagagggggaagaaagggcagcctgagggagtgtgaaggtgatgggggccagggccagagaagcaggaggggacggtgtgcttagagccaagcacagcagggtgacgggcagagaagcgggaaaggggatcctgagaaggaccagccagggcccttcctccctccccacactcttgcctttcccctttccccaacatacaaactctgtattttggactccgggggtgggggatggtctcccttgtcatcggagagcaggatccatgggccagcctcatcctcactgagacagaggagagaggagaagtgagggccattgatcaaggccctgagggacaacaggaatccagcaggggggatggagggactgcagggcccccggggctggagagaaggcaaccctggggagatgcaggatgtcgagcctttaatttttaatttttttttttttgagacagggtctcactctgtcgcccaggctggagtgcagtggtgcgatctcagctcactgcaacctccgcctcccaagttcaagcgattctcctgccgcagcctcctgagtagctgggattataggcacatgccaccatgcccggctaatttttgtatttttagtagagacggagtttcaccatgttggccacgctggtctcgaactcctgacctcaggtgatctacccaccttagcctctcaaagtgctgggattacaggcgtgagccaccgcgccctgccaagggtttattttatagcttgacacacagcaggccctgacacagccgcggctacagtttcacccccgtaagaataaacagacccagccaagacaggaacttgaagaatgaatgtggagaggcagtgttgtcaggcagaatggatggcaggcaaggcaaggggagtggtgagatccagggagaagggcgcaggctggacagcggccatgggacacagccagagcaggtcagcaggccctagaagcggccaggctagggaggctcaaggggtgaccgggttggggtgacagcctcagtctgagacaatgggctcagagggtgaccaggctgggtcatcaggctcagcagaatgagggagggaggcctggctccgtgggaatgcaggcagggacctacctgctctctgcttcctctggtgtccctaacatcttggccttgatcttcttccgctgcttccggacagccaccttcatggcctcgagcagaaggccggggacccggtggtctgtgagcagctccctaaagaaaaggggcagggagggagaaagccctggtgatgccagccatggggatgccagcagtggagatgccagccgcagtcctcactcctggtacctgtgcacgcagctcttccctgaacacgggaagcgctctgccttgctgacaccctcagaccttaaattaggtggccccgtggccccctcctaggagagattccctggctgctgcagctgcaaccctttgtactgtccctctcccctgtctggatgacattgcaggagggcaagggctgtacaattcatgtcctcccagttcccagcgcaggcctggcacatgtcactgtggacatgtcaatgactggagaatgaggtggggtgatcggaggccccccggcttcccagcgtcctcaccgctggaagtaggccagttcctccttgagcaggaacactttggctttgagttcattccgctcctgaaggatctgctcaaactcctcccgactgaagcggcactgccctgcctccgaggggcgcccgagctgctgcgcggcctccgcctttggaaggacaggcacagtcagagggtcgcctcggctggcgttcccccgccccagggccatcatgggaatgctagaggaagtgacgggccgggagacttgggggacaagggtgccctaacagataacagagcagtgctccagctgagagcgggggccgaggccggccgggggcgcagatctgtctgccacctccccgcttcctggccgacctgctgtgcagcatgcaaaccttgcttgagtgcccaccgagggctggacgctgcgtcctgggctgggtccttgccctcatacggcactcaccgggtcctcagggttccctggggcgcctgcgccggcggtcgcccattcgggctcctgtccgtgctggtgcccgggccgcccggcctgcccccgcgctcgctctttagcctgcggagtcgcggcttcgccaggctgctggcgctccctctcgcggtcctgcgcggcgcgcagctgggtctgcatggccgccagcttgtgccgcagctcagcgttcaccagcaggaggcgctgcagctgctcctgcaactgggagcggagcaaagggtggggtgggcggggcaccgagggccccccggagccccgcccagcgcctgcctcgctccgcccccgcccccggagccccgcccagcgcctgccacgctccgcccccgccccgccccagagccccgccccgccctcaccgcctcggtctcctggccgcgctgccgcaggtcgcggttgtgcgcccggagttcgtcccgctgtcggtccgtgacctccttgagctgccgcagcagcgcgcgctcctctgaggaaggggcgttcttagcggcggcggcgcgcggcccgcgggagggaggggaggacccgagcaggtcgtcacccgccctgccctggccggggctgcgcttaccctgtggccccgcgcgcagctccctgcggaggcgctcgttctcctcccgcagccgccgcagctcctgctccgccggctgcgccgacacctgcagctggggagacccgggtctcaggcttcggccctgccggccccgtgggtggcgaagggagggccatgactcaccgagtccggggcgggccccacggcagcctgttccaagagctccagcgcccgcaccactagcggcaccagcccggccgccgcctccggcccgaaacggcgcgccagatcctgcagctcagtgcccagggccccggctagatggtacacaagctccgcggccgatgccgaccccgcggcctcccgagacccccagccaggcaccccgggcgccgccctcctgggctccatgtctcccagaggcttagggctgcgacccccccaccccaccctccactgggacggggaaaagcgaaacagttccgccccaggaagccgtttagggcggtgtgggcggggtagaagcgataagggtagggaggaacgaggaagggagaaggcgtggggtagggagatagtgccctaggtcgcctgggctctgtcctttccacccccaaggtcacaggaaacaagacagccaacttccagccaggcgtccaagagctgaggttcagggctgcaagtggtcacttgagtggagccctccccacaggcccaatccaggctccgcccgtttggagtcatggggccaacttggcagtggcccgctccaggcgagaggtgacaggtaggcagccggtctctggcctccgcccggctgtacacaaactgcctgcctgtgtgcttgttttcctgaccaggactgacacagaaagcttaaagggctgggctggacaccgcagccgctcagcacaagccacagagttcctagacccgggaaagggcaactgctcccaaaactgtggaaaggaggcgagagcttccaagtagttttgtggaaaaagcagcaaatgtggtcaaggcagcggagtgtgaaagcccagccctgcctcaggtctccactgagtccaggggctatctaccccaaagccctgaataggaagggggcctcatactccccccttcacagccgagcccagcatcttgctgtgaaccgctccagtccagcctcctgttagacctaaatccagaatttgagtttgggggggaaaaaaaaaacaaaccagcccctgaactcctatttatacaaaatttattattatattttattcaggatgacaagccatcaggaggtcaacaacacaagcacagacagagggaaagaggccaaactgctgaatgtcagcggcctgtctggaggggctgaggcttcggcctcgggaggctgaagcaggaggcagggaaacggtcaggcatacaggtcctcccgatccgcagagtaaacctccccctcctgcaggagagcaaagttgaggaagtgagagggcctgtgcacctcgtggtagaactctttggggttcgccagctgtagctcatatttcatgttggggtcatgccgaacaccttcggggagaaggaaacagccaatgttaacagggctcctgcctcatgcagcctgcgccacctccaagccagccaggccccaagtgcaaagggcgatggcctcaccttatccctactgctatccccacatccccaggctcctcccacttacccatgaagttgtagttccacgaggactgggcagggaccatgaagaagccaaggaaacggtccgacagcagcatctgcaccctctcatagtgtgaaggcaggtagcccttggggttgttgcccttgtctgtgttctggcggccccattcgtagccactgggggtcagcttgtaggccgtcagtgtacaggagcctggcgtgaagctgggggaggaacgaggacagagtaacagctcaggccactgttctgggccctggcctgcaatccctgccccaccatacttcctcccaaggagcccaggcccacctgcatgtgatgataatggtcttctcgccatcccaagatgggttgtcagccatgatcttggcatgggtggtgacatcctggggtgataactgcggggactcattgggctgagtgtggatccaacctaagggttccatctcctataggtaaagaggagtacagagctgaatcccatccacagacaggaatcgcaccagcttttccacactcccaggctccatcactccccattaccttgaggtactcatgctggggcagctggccaggcaggtgcacggtctggtgagtgccccactgcggcaccatcacaatgcagcggatctccttcacctgggggttatctggtgggctcaccccatataggtatcctgcaatctggagacaaaggggtcaggaaccaaaactcttcttagtaccaggtcagagttggagctgccagccctctgtttccttccttcccccaagaacgaggacagagtttcttaaaacgtgatcagaaccccctgtatcagaatcagctggggtgcttgttcaaaatgttagacatggacctcatcgcggacttaccacatcagaatctcctgagtggggtccaggaatctgcactgctcacaagctccccagctgattattaagcatagtattcacaagcaaatgagcacacatgcagctcagtgtattttcacaagctgaaaacatctggaaaaccagcacttggtgctattttaagttttacattatcaccaagaaagaaagaggatctgtttactataaactcacccacacaggatattaacaatcttttcaaatttgccaacctgacagccactaaatagtgggtttgagatggagtctcactctgtcagcaaggctggagtgcagtggtgtgatctcagctcactgcgacctccgcctcctgggttcaagcaattctcctgcctcagcttcctgagtagctgggactacaggcacatgccaccatgccccgctaattttcatatatttaagagagacggggtttcgccacgttggccaagctggtcttgaactcctgacctcaagtgattcacccaccttggcccaaaatgatgttttataaactataatatccctgatacactagtaaagttatgcatcttttctcttttttgaagcagggtatcactctgtcacccaggctagcaggcagtgacatgatctcagctcactacactcaccaccctccaggatcaggtgatcctcccacctcagcctcctgagtagctgagattacaggtgtatgccaccatgcctggctagttttttttttttttttttgtagagactccatttcgtcatgttgcccaggctggtctcgaactcctgggctcaaaagatctgcccacctcggcctcccacagtgctgggattacagtcatgagccactgtgcccagcctggagtgcagtggggtcatcaaagctcactgcttgcgttcaagcaacctcatcctcctgagtagctgggactacagccacgttttttttggttttgtttttttagacggggtcttgctctgttgcccaggctggagtgcagtgatgcaatcttggctcactgcaagctccacctcacctcccgggttcaagcaattctcctgtctcaacctccctagtagctgcaactacgggcgcatgccaccatgcctggctaattttttgtatttttagtagagacagggtttcaccatattggtcaggctggtctcaaacccctgacctcaggtgatccacccacctaggcctcccaaagtgctgggattataggcattagccactgtgcccagccgagtgttgggattacaggcatgagccagcacgcacacctggtcaggaatttgtttctgaccatatctgttctcttccaaatactatcaggccaatactacaattactaccttctctcagctgccacagcttttgctatctcatggggccaaaacccacctcgttgttttggctatccttgtataattactcatccatgaatcttgaaaccagcatctcaagttccagacaatctcaggtctgagttttaggcacaaaatgagttgggcacacactgtggcctagctgagtccacttactcacttgggcccgaaggtcagatatgcagatgaacttcttaagcacattcttgggaaggatgtaggtgtagccagtctccttgatgtcgtcagatgaaacatagatgtgattggtccttaggtgcaggttggcagcagagatggccctaaaaacaggcagggagtgtcagcatcgctcagcccagcaccttaggtagtgcagccggcctttccatccccaccctcttgcccgacagtacctgaccctccactcagtcttggatgagaaagtctgggtctcatagttgctggtggtggaggtgatgatctcatcgccatgcttgttgacagtgcgagtctgtgttgccgtcagctgcgattgttccttggtctgcttctcgatctcagcgatctgctgccgctgctgtgacggtgccgagatctccatacccaggatgatgtctcgaatttctgattgtgtcagtgatgccacgttcacactgtggggatggtgtgggttatattacaaggatcccttccccttggtcacttctgcctcaatggaaagggtgtaacttggtaggacaggacagcctatactcacgccccagacaatccacaagagctgcttctacaggaagtgtgaaacggaggtgcactaacacttccaagattcgtcagatccaagcgggacagcacactgcgtgtgcaccttcccactgtttagcatccataaaccctacgcttccttgaccaaaacaatgctctggcatggaactgttctcagaaatggaaaccccagaaaccctagaatactggttcttaatcagaggtggtattgtccgtcaccctatggataattttggttgccacgatgacagggagggagacgaggggaggaaggtgtgtgtgtgtgttggcagcagtctcggatacttagggtctcggatgttcaaaattcttcccatgtatggacagtaaagaaatgccctgtttgaaatggcaacagtgagaaacaatggccaagagtcagactgaagccctaaaacagggatgcttcccatactattcgaagacactgctgtatctctcttcctcgagactctgtaagataatttctttccttgttttcaagacaagagtctcgctctgttacccaggctggagtacagtggcatcatcatggctcactgcagcctcaaacccccgggctcaagcaagcctcctgcctcagcctccaagaagctgggactacaagcgtgtaccaccacacctgttttaaattttttttttttggtagagatggcgtcagtctcttgttgatcaggctggtttcaactcctggctcatgcaatcctcccaccttggcctcccaaagtgctggtattactagcatgagcactcaagcctggctaagacaagataatttcttgagaaacgtcttttttttttttttttttggagacagtctcactcttgtcgcccaggctggagtgcagtggcatgatctcggctcactgcaacctctgcccccaggttcaagcaattctcctgcctcagcctcccgagtagctgggattacaggtaggcgccatcgcacccggctaacttttgtatttttagtagagacggagtttcaccacgttggccaggatggtttcaaactcctgacctcaaatgatctacccaccttggcctcccaaagtgctgggattacaggcatgagccaccgcgcctggccttcttgagaaacttctaagcctaagtgcttccaaaaaaccccagaaaaccgtatatagacctcctgtctgtgtccccaccagcactgctcacttgtttttcttgccgtagtcagccaagatcagatccttgagctgcacctcgaccttgatccattcttcgtcagtcagagtgggccagatgtggtgtggttctgtaatagtagtcttgtctggcttcaggatcacttttgcccgatcgttgttcacatgtagggcacgcagaatcaggatgagacgggagaaggcctgggaaaagatttggaagagtggggtaggtcagctgcttgaggctctcccactttaatcctaacctttcatgaaacccaagaattttttttttttcttttgagacagagtcttgctctgtcgcccaggctggagtgcagtggcatgatctcggctcactgcaagctccgcctcccaggttcataccattctcctgcctcagcctcccgaatagctgggatgacaggcacctgccaccacgcccggctaattttttgtatttttagtagagatggggtttcactgtgttagccaggatggtctcaatctcctgacctcgtgatccgccgcctcggcctcccaaagtgctgggattacaggcgtgagccactgcgcccggcctttttttttttttttttagacagtcttactctgtcgcccaggctggagtgcaatggtgccatctcggctcactgcaacctctgcctcctgggttccagtgattctggtgcctcagcctcccgagtagctgggactacaggtgcatcccagcacactcggctaattttgttgtatttttagtagagatggggtctcgtcatgttggccagcctgatctcaaactcctgacctcaggtgattcacccaactcagcctcccaaagtgctgggattacgggcgtgagccaccacgcccggccccaagagttgatttttaactttaaggtcttaaactctcatgaaagtcaacagagttcccacccaatctataggctaaaaatgtgaaaatggcaaaaacctgacacaggatcttctcctaaccctaaacccgctcctcctccagcgatcttctcttcccgaggttcataccgtgtaagatgaaatagtcttgagccagtcgtcatagaggttgaagagaaccatctggggctcagtggctttaaggatgagatccccgaatttttccaccttgagacacgcctggaaagggagttggagctccgatcctttgatgacaatattggggaagtccagtaagtgcacctaagacaagatcaagtccaagatgagaaacagcctgaaggtctcaaggtctcttttctcctaccccaccccaccctcttacctccagtgggtccagcatgcccttcctggtgacaatgatctgcttgggctgctcctccacaggcagagatcggatcagggcggccacctcctcagctgtcttccacttagccaacttaaaagcaagagagaagaaaatggaaatttagtctctaccctcccagatcaactagaacagaatatcctagttttgaaataatccaactacgtttctattgaacactgatgttaaatgttaggcacttagaaggtacaaagagtatcaaatggccgtgtccaatgaccaggctgacagcccctttcaacaagacaataccacaagctgacacatgagtatgtgctaaactatacactgttttacagagttcaggaacaaaagaaattaaggctactaggatcagaaaaaagctgcacaaaaaaacgtgtcttaaggagggactgtgattaacagagcaaagaggggagttcattctagaaagaaaaatacaagcaaaacacagatttggagatgagcatcaggggtttgggctactaagatcctggactgaatgtaagatgaaacatgctataaatgtaaaggaagagaaactggctggacagatacagcccagccagatgttgaacgtctaggaagctaaagaagagttaattcagcaagagttgtgaggtagagaagagatttggtcaaagtggatgtttcaagaatatgcgttgctgggccgggcacggtggctcaagcctgtaatcccagcactttgagaggccaaggcgggcggatcacgaggtcaggagattgagaccatcctggccaacatggtgaaaccccgtctctactaaaaatacaaaaaatttagccgggcgtggtggcgggcacctgtagtcccagctactcgggaggctgaggcaggagaatggcgtgaacctgggaggcggagcttgcagtgagctgaaatcaggccactgcattccagcctgggcaacagagcaagactccgtctcaaaaaaaaaaaaaaaaaaagagaatatgcattgctggccaggagcagtggctcacacctgtaatccgagcactttgggaggcagaggcagaggcaggcagatcacaaagtcaggagatcgagaccatcctggctaacacgttgaaaccctgtctctactaaaaaatacaaaaaaaattagccaggcgtggtggcgggcgcctgtagtcccagctactcgggaggctaaggcaggagaatggcgtgaacccgggaggcggagcttgcagtgaaccgagattgagccactgtgctccagcctgggccacacagcgagactccggctaaaaaaaaaaaaaaaaaaaaagagtatgcgttgcctttggaaaaatgatttttgatagccctgttcaaggttagaaattcaggaaacagaccagctggaagggaacgaagcacctcatacactcttggacctcccacagaatacttcccaaggtattttggggataagttcaaatgagatgttctcagcctttcatctaataaaccagtaaatattaccaagtccaccccaagaataagaggcaacatggttctacagcctcttcatctttaaacctgctcacctgccccaaacgcttctgtcccgcccacacggacgtgtggattatcttgaggaacagctgccctgtgcgtgggttgaagatgaagatggctccgttgatgggcttggttgtcaagttcccttcaaaggtctagaggaggacggcattcgttagcatggcctacacaacacatccccatcctgccttcttcccagcatgtgtacacacttagcccattactctcccacagccatgtacagagtcccgcacctatacactgctgctaacactcaccttgtgaatagtcactctgtagacgttggtgtcatccacaaaccagataatctggttggagaagagctcaccatagttctgagaagacaaataaggctcagtgggttcagatgaatagagctgtagccccttgcggatccgttcacgtaacacatacagggcagggtttgccttcatgatcttggccatggcctgttgtatgagaggcttgctgcctgggaaccagtttccataggcactgtgaggataaaagggtcaagaaaagttaagacgagaatgacagccccagaaacaagacaagctgccaactctacagaggaagaaagactgttcgccaggctgacaacactctgctcatgtgtacatacaggctggagaagagaatcagtgacccataggaggaatgggccacttcctctcacttaggtaaagtaaaaaagtatgactacgttaaagtatggagctaatggaaaatacacggattatttatttatttattattattattatttttctttgagatggagtctcactctgtcgcccaggctggagtgcagtggcgcaatctcggttcactgcaagctccgcctcccgggttcaagtaattctcccacctcaaccttctgagtagctgggactacaggcgtggaccaccacgcccagctaattttttgtattttggtagagacagggtttcaccatgttgcccagactggtctcaaactcctgagctcagacaatctgcccaccgcggcctcccaaagtgctgggattacaggtgtgagccactgcgcctggcctgaaaatacatggtcctgagcctcaactcacctgtgcaagttataggccaggtcaatggcgatgagtacacctgtgggcgaagggtagatactcatgttgtcggtggtgtagtccaggaacttggcccgggcgtagcgctcaatgtcgtgggaatcatagtccccccagcgcaactggatgtcaatccagtatttctgggtggtggtgctgtccatcacatccctgaggatgaagagggttcaagcttctaagaaaccatgggcataaccaatgtccccagaaccagaaccacttaaatcccaaaaccatcccacccactccaccaacttgttccaggtcagcaggaccccagagaatcagcagatctgactaagggtgttgacaggctccaagcgtagcactggctccaagtttgaaacaaaggcagacaggacaattcctaaagttgcagggctagaagaacaggaaaacgaaagtgtcctggctgcctagggctgggtcctgaggcacttacttggagtcagccagcaatgagggccgggagacattccacttataggaggcaaagagcaggatatctgcacaggaagagttcatcttatatgactttcggggatggattgtctccttttgtactgtctcaatttccagtgcatcaagttcctggtcaaacacctgaaggaaaacatggagagattaagacttgttaaggaagcccaattaaaatcagagtttgtacaataagataatgaggcaataggagtctcatcctcagagcttccagggtggatttcccatatgcaaaagagcaagctgagctgactctgtacagcacgctctccccgcgattccacctgagctgactctgtacagcaccctctccccgcgattccacctaagctgactctgtacagcaccctctccctgcgattccacctgagctgactctctacagtaccctctccccacgattccacctgagctgactctgtacagtaccctctcccctcgattccacctgagctgactctgtacagtaccctctcccctcaattccacctgagctgactctctacagtaccctctcccctcgattccagcccacctgacataagtccataacaatgctctcatggatcttctgccacaagtgagctcggaagatctggatgagagagatcttcagcgtggggatcttgccgtgcatgaagatacccgtcaggtctagctgcacctgaaagcctacatatacctgccaggaaaacgacaatgtgacattagagatcaagagactcgggcgctcacgacataaccaaggcaagaagcagcaactgtctttagcttcccctctccagtgtcaatcacactcacattggctcgattaatggtcggggaccaccagagggtgaatctacgattgggaatctggttcagtcctgatcgctgagcattagttagcttcttccacttcatagattcctcaaagccactggccttctccctggggagcaagagaagcaggtgaggtgatatcctgccatttcccagcacactgctaacctcctggaggtggctgtctgggaaacaccacaggaaatcacagaggcatacaagagatgagctcaaagggttgtgacaggtccctctaagagaggagaatcctcaccagaaaagcccctcccaggtagggaagtaagtgcccttaaagagtgtgtgttccagaatgccttccacaccgcccagggcctggatcatgtctgtacggtagttgttcaggttccagagcttcccatcatgccgctggtgtgtccaccagaacggattctgcttcaaaacctagatggcaaggcaggcacggtcaagcttctgggtgcctattgccccaagtttcggggatagccatggattttcctgactcagggaaaatctgctccctctacatacctgatactgcttaaagtcagttctgacacgccagcccttatcataagccagtgtgtgccggtccttctggaagagggtattgattcgaggaatgccacgatcccatgaatcttctaggtcttctaaagtcaggcgtcttccaaaaaaagaaagattcaagtcaaaacgtgatctcatatgaggagctcagcactccttcctggccaaaaataattagggtcagtagaaccagccttctcacctccatacaaccatggcatgctctgaccctgaactccacacggttcaaaggccaccactgcccctgccccagggttggcatgccctcctaggtgcccacctgttctgagcaatggcctcttgcctcttgagtgcgtactcagcccagacccgctgagaatcaatgaactcgctctcccatggctgtatgtagcggtacaagttgggaatgagctggtcttcttcatggctcattcctgaacgaaagtgtgtgatacctacatctgtctgtttggaccacctgtttgggtgtacaaccaagattacagaaaaaataaagcctaaaactaaagaaatacccacttcccttagggcctgagcaatagggtttagaaatacgttgaaccaggctgtacctgaggtcggattgggggatgagcacatggcccattgagagcatgccgagtccacccaactccttaggggtgtagaacacaaccggggggaaccgacttggcatcttggagttgagtccaatcttgatacgtgtctggattttgttctcacacttcaccagtaagtccaagagctcttgggtgttcaccacagcctcccgaaagtatgtcataaggccaatgagagctgtattccacttattcacaatctaaaggtagtagaaaaaaaagtaaattacagatgagccaggggcggggagggtggagactacttgatgcagttagttttatccctactactaaagaaagatttgagttcaacatcattagtcactagggaaatagaaagcaaaacacaatgaggctgggcgcgatggctcatgcctataatcccagcactttgggaggccaaggtgggaggactgcttgagcccgggagttggagaccagcctggccaacatggcaaaaccctgtttctactaaaaatacaagaattagccgggtgtggtggcagacgcctgtaatcccagctactcagaaggctgaggcaagagaatcgcttgaacctgggaggtggaggttgcagtgagctgagattgtgccactgcattccagcctgggcaacacagcgagactccatctcaggggaaaaaaaaaaaaaaatggttcccctgggccaggtgtggtggctcacgcctgtcatgccagcactttgggaggccgaggtgggtggatcacctgaggtcaggagttcaagaccagcctggccaacatgaaaccgtctctactaaaaatacagaaattgaacccaggaggcagaggttgcagtgagctgagatcgcaccactgcactccagcctgggagacagagcaagactgtgtctcaaaaaaaaaaaaaagaaaagaaaaagaaaaaaaaaagcacaccagatggagctatacaaactagtgaagaacaccagaaatggtaagtatgtgggtaaaatgcaaaaaaatattttttctcattttgcaatttctacaaaagataaaggctgttcaaagcaaaaagagtaacaaagtattatagcacttataatacatgtacaattaaaatgttatgacaaaaatactactaagagtgggagtggaacttaaagtgtattattctaaggttcttgtactatatgtgaagtgatccgtagtagactaatggtcaaagtagatcacagtaagtgagctatgtatatactgtaaaccttagagcaaacaataagaaaaaaaccatgtagccaaataagtgaaaagtggagataaagtcacaaaacaactaaattcagaagaaggcaggacaagagaaaagcagaaaaaataatttaaaaaaaaaagagtaagacggtagatttaaactgagctacattgccacattgatagttacattaaccttaattgaggtatttagaccatttgtaaggcaaacattgtcaaattggatttaaataaaaaggccgggcatggtggctcacacctgtaatcccagcactctgggaggctgaggcgggcctcggggtcaggagttcgaaaccagcctggacagcatggtgagaccccccgtctctactaaaaatacaaaaattagctgagcgtggtggcacgcgcctgtagtctcagtttcttgggaggctgaggtagaagaatcgcttgaactcgggaggcagaggttgcactgagccaagatcatgccactgcactccagcctgggcaaccaaggaagagactccatctcaaaaaaaaaaaaaaaaaaaaaaaaaaaaagagccaactatatgctgtctataggaaataaactttagttacaaagacacagattaacagtaaaaagatggaaaaatacacccatgcaaacacaaaacaaagctggagtggcactactgattaagacaaagacttcagaccatggaatgttatcaggaatacagagggatatttgatacgataaagtagtcaactcgttcagaagacctaataatcctaaatacattatgtaactaataacagaatttcaaaaatgatggacctgaaagacaataaactcacagctgtagttggatctttctctcaagcaagacagggtcttgctctgttgcccaggctagagtgcaatggcaccatctccactcattgcagcctccacctcccaggctcaggagactctcccgcctcagcctcccaagcacctgggactacaggcgtgtaccaccacacccagctaatttttgtattttttttgtagaaatggggtttcgctatgttgcccaggctggtctcgaactcctgtgctcaagcaatccaccagcctcagcctcccaaactgctgggattactagagatttctaatactcctcagtaatcgatagaagtatacaaaaaatatcactaaggatatagaagacttaagcaatgtaaccaactgactggacctaatgtttgtaaaacactcaacctaacaatagcagaatacagattaacagatattttccagcacacataggacaggcaccaagagagactgtacgctaggacatcaaaaagtcagcctcagccaggtgcagtagctcatgcccgtaatcccaactctttggaaggctgaggcaggaggatcgcttgcgcccaggagtttgggtccaacctaggcaagagtgagatcccacctctaaatgaattaattattaaaaaaaaaatcttgatacattttttaaaactaagatcatatacaacatgtttcctaatcataatggaatcaaagcagaaactaataagggaaacccccaaatatgtaaacagcataatttgaaacaacctaaggtgaaatatgaactcataagggaaattagaatatacttttaactaaataaaaatgaaaacacaacatattaaaatgtgaggaatggggccgggcacgatggctcatatctgtaagcccagcactttgggaagccaaggcgggtgaatcacgaggtcacgagttcaagaccagcctggccaacatggtaaaaacctgtctctactaaaaatacaaaaaaaaattagctgggtgtggtggcgggcacctgtaatcccagctacttgggaggctgaggcaggagaatcgcttgaacagggtaggcggaggttgcagtgagccgagatcgtgccactgcactctagcccgggcgaaaatgtgagactctgcctcaaaaaaaaaaaaaaaaaaaaagggaggaatgcagctaaagcaatgctgagaggaaaatttacagaagtgaataatactattagaaaaagagaaaggttggccaggcacggtggctcacccctgtaatcccagcactttgggaggctgaggtgggtggatcacgaggtcaggagatcaagaccatcccagctaacacggtgaaacccgtctctactacaaatacaaaaaattagctgagcatggtggcaggcgactatagtcccagctactcaggaggctgaggcaggagaatgacacaaacccaggaggcggaagttgcagtgagccaagattgcgccactgcactccagcctgggcgacagagcaagactccgtctcaaacaaaaaaaaacgagaaaggtcagctgggcacggtggctcacgcctgtaatcccagcactttgggaggacgaggcaggtggatcacgaggtcaagagttcaagaccagcctggccaagatggtgaaaccctgtctctactaaaaacacacaaaaaaattagccgggtgcggtggcaggcatctgtaatcctagctactcgggagactgaggcaggagaatcgcttgaactcagagggcggaggttgcagtgagctgagatcgcgccactgcactccagcctgggtgagagagtgagactccatctcaaaaaaaaaaaaaaagaaaaagagaaaggtccaggccaggtgcggtggctcacacctataatcccaacactttgggaggccgaggcaagctgatcaggtggtggtcaggagatcgagaccatcctcgcaaacacggtgaaaccgcgtcgtagtaaaaatacaaaaaaaaatattagccgggtgtggtggtgggcacctgtagtcccagctacttgggagctgaagcaggagaatggcgtgaacccgggagacggagcttgcagtgagcagagatcgcgccactgcactccaacctgagtgacagggcgagactctgtctcaaaaaaaaaaaaagagaaaggtccaaaattgataatctaaccttttaccttaacaaactagcaaagggatggcaatgataagagaagaaatcaatgcaacaaggccaggcgtggtggctcacacctacaatcccagcactttgggagcccaggggggtggattacctgagctcaggaattcaagaccagcctgggcaacatggcgaaactgtctgtatccaaaatacaaagaaaaatcagccaggcatggtggcatgtgcctgtggtcccagctacttgggaggctaaggtgggagggtctcctgagcctgggaggcagaggttacagtgagctgagactgcgacactgcacaccaacctgggtcatagagaccccatctcaaaaaaaaaaaaaatcaatgcaacaaaaaagagaaaaacgataaaaattaatgaaaccaaagctgtttctttgaaaagctgaataaaacaagatagcaaaccacaaaataccaaatgatatagtcaagactttaaggcaaaaaatgtcttctgaacaattattgaggtgaaagagtgcgttggctggagttactatagtaatctgccttgagcaaatggtattcagacaagcaaggagaaaagactgcaggtgagataacagctcaaaccctactatgaaagctagactgagcatctcgcatgtccacaggatgagacaaccaggcagatctacagaaaggaggggggccgggtgcggtggctcatgcctgtaatcccagcactttgggaggccgaggcggttggatcatgaggtcaggagtttgagaccagcctgaccaacatggtgaaaccctgtctctactaaaaatacaaaaattagccgggcatggtggcaggcacctgtaatcccagctactcaggaggctgaggcaggagaattacttaaacccgggaggcgggggtcgcagtgagctgaaattgtgccactgcactccagcctgggcaatagagcaagactccctctcaaaaaaaaaaaggagggccaggggccaggataggctagatactggggtaaaggcaagtggatgattcccattaggtttagtaaattcttggactgcacttggaattgctgatgtgtgtaatggaacacagtatttctgttgtagttaacagtgctctatccctgaaggggaggaggcataaattcctgaggagcccagtgttcctttactaaatagcagaaattcctgggggataaggggaggcaagaaggaaaataatatttactcaggtctacgtgtactaggtaccatggtaagaaatttatatatgttatacctcttatgtcttcataaaaaacaagttatagaacttgcccatgacatagctttttttttttttttttttttttgagatggagtctcactttgtcacccaggctggagtgcagtggcgcaatctcagctcaccgcaacctccacctccggggctcaagtggttctcctgcttcagtctccagagtagctgggactacagacatgtgccaccacgcctggctaatttttgtatttttagtagagatggggtttcaccatattggccaggctggtcctgaactcctgacctcgtgatccacctacctcggcctcccaaagtgctgggattacaggcgtgagccaccgcacccggcctatttatttatttttaaatataaacaggatcttgctatgttgcctaagctggtctcaaattcctgggctcaagcagtcctcccacctcggcttccaaaagtgctgggattgcaggcataagccaccatgcccagctttatcatgcaatttaccaagtaatatggcttactaaataccccgtttcatttaattctcacaaaagccgtctgacctaggtcctatcagtatccctattttacagatgagggaattgaggcccagcatgggcaatattcccaagatcccaactagtaatatgacaaagatatgatgtgaaccccatctgactccagagcctgtgcttctaaccactagagtcaactgcatccttaccctctcagacactcctccactcctcagcctctaacttctgatatccagttccctgatgcctacaattctttcccaggccaatggcctcttctgctctctctcctctcccctcttccagtatctcaatggggtctagcattctttttttttttttttttttttttttgagacagagtcttgctctgtcacccaggctggagtgcagtgtcgcgatctcggttcactgcaagctctgcctcccaggttcctgccattctcctgcatcagcccccctgagtagctgggaccacaggcgcccgccacgacatccagctaattttttgtatttttagtagagacggggtttcaccgcgttagccaggatggtctcaatctcctgaactcgtgatccacccgcctcggcctcccaaagtgctgggattacaggtatgagccaccgcggccggctgggtcccgcactcttgattcccttgcattcaatgccttaccactctacaactgtcttctaacagagctctattccttaatcaccagtgtaatctatccaccttctgcatccctgtcactgagtagctgggtgattctgggaaaaacaaatgctcagagttgtcttcccaaaacccagctgagctcccaacacaccttccaatccctctcagtttcttcagcaatcatcataccctaataccatgaaattcactatgcacaactctttcccctaactgcagcccaagaaaagctgaaaaactcaaaatcctgttatagcttcccactaacctcatctatatccacatctttccagacctctttcctgtcaggttcagaggatttttcctctgcttgctctttattctatccctagggagaccctctgcacctctgctcatcaattacctacttttcttttcttcgagacggagtcttgctctgtcgccgaggctggggtgcagtggcacgatcttggctcactgcaacctctacctcccgggttcaagcaattctcctgcctcagcctcccgagtagctgagattacaggcacccgccaccgcgcctggctaatttttgtatttttagtagagacggggtttcaccatgttggccaggctggtctcgaactcctgacttggtgattcacccaccttggcctcccaaagtgctgggattacgggcgtgagccactgtgtccagccaattccacacttttctcttgtacactcaactgctactgggctccttaattaaaacacgctcaagtcactgtcattcaaaaacacctgcactgacttacagctccctctaggtggcatctgatgtccttccttctcttcaactgacaaacagattgtccttgctgtctccactcactcacttcccatgaagcctcacccactgccatctggcttccatccctactatttctgtaacagctcctgctaaggtcaccaatgacgtcctaactgtcaaatccaatggatacttttcagtcctcatctaactgaaatgctcttaggcaactgacactgctcagcatcaccccaattctggacacgtgttcctgaaggccttggttccaagacccggcaccctcccacaggttctgaccacacttcatcttagtattccccacatttccaaattcctccctctcctcttctcactccacattgtccctgggtgatgtcactcattcttgagcttttgaccttttgtggataggctccgaaatctacatctttaatccagacctgttctccatgtttcttcagattgcttctcacctaggaacctctaagctatccctgactgctcttacctttctagtttcatttctctccctggaatgtctcactcatactttttaaatcaaatctaacagatcatcaattaaagaggcaccactaagggagcagaaggaatcaggaatctacacatgtgtatatatgtacttaaatatgtatcttggaactgaagaaataaggtataaataaatacctggggaaatctccatctgaatgttctcaggaacttcaaactttatatatcctaaactagatttctttatcttcgatcctaaacctgttcttgttcatgtggtcttccagttggtggcactaacacccacctagtcacccatgccaaaatctgcacatcatttttgacttttctttgagcatcccaggaccacaaagttctgctgattttatctgctaacttcttatcaaatctgttcccctcttcctacctctactttcagtgctctcatcatttttattgatttatgtatttttttggagacagagtctcaccctgttgccaggctggagtgcactggtgggatctcggctcactgcaacctccgcctcccgggttccagcgattctcctgcctcagcctcctgtgtagctgggattacaggtgtgcaccaccacgcccggctaattttcatattttaagtagagatggggtttccccatgttggtcaggctggtctcaaactcctgacctcaggtgatccacctgcctgggcctcccaaagtgctgggattacaggcgtgagcccccgcgcctggcctgctctcatcatttttatctggacttcttcagtggtccccaaacctggtctcccatcctatcctttcaggtccatctttctcacagctgcaagagtgaatcatctaacacagaaatttgacaaagtctgcatctgtagtgtgggaagccaaaaaaaaaaaagaagaaaaacacatctgacaaagtcactctgtgcttaagacccttatatgattcttcctaaggtgtgcgatgccctccatgatatggctctccactatttatccagcctcatctcttaacattcccaattccacaatttactccagcaaaccttgaactttccatggtcccatgtacacaagctagttacatcgccacacttctggctaaaggaatgctctccctcacctgtctcatcacatgctacttctttcaggaatcctttcctcttccacttccagactgggctagagcaatcactaactctagtgctctcacagattcccacatacaggttaatctaaaacccaaaatgctcacaaaaagctgaaactttctgagtcccaacattctgagcaccaacatgacgctcaaaggaaatgctcattggggcatttcaaattttggattagggatgctgaacctgtaagtataatgaaaatatttcaaggctgggcacggtgactcacacctataatccagcattagagaggctaaggcaggaggactgcttgaatccagagtctgagaccagcctggacaagagagtgagatcccagctctacaaaaaatttaaaaatcaggccgggtgtggtggctcacgcctgtaatcccagtactttgggaggctgaggcaggcggatcacaaggtcaggagttcgagaccatcctggctaacacggtgaaaccccttctctaccaaaaatacaaaaacttagccgggcgtggtggcaggcgcctgtagtcccagctactcaggaggctgaggcaggagaatggcgtgaacctgggaggcggagcttgcggtgagccaagactgcgccactgcactgcagcctgggtgacagagcaagactccatctcaaaaaaaaaaaaaaaaaaaaaaaaattaaaaattagccaggcatggtggcgtatgcacctgtggtcccagatacttgggaggctgaggtgtgaggatcacttgagctgcagtgagctatgatagcgccactgcccttcagcctaagtgacagtgagaccctgtctctaataaaaataatgaaaatattaaaaaagaaaatctgaaatccaaaacatttctggtcccaagcattttggataaaggaaactcaaccgtaatgcaatagttctaaaacataacagaacgtatccttaacagacttaactaaaaaacagaaaacattctgcgcatgcaaatgccgcacatttagagatatgaaggtcggaatgcaagaaaaatgttatagctaagagttactctaatggaaaccagagtaaggtaacttttttttgtttgtttgtattttgagatagagtttttgctctgtcgcccaggctagagtgcaatggtacgatctcgactcacagcaacgtccgcctcctgggttcaagcaattctcctgcctgagcctcccaagtagctgcgattacaggcgccggccaccaggcccggttaatttttgtatttttagcagagacgaggtttcagaaccacactggacaggctggtctcaaactcctgacctcaggtgatccaccagcctcggcctcccaaagtgctgggattacaggcgtgagccaccgtgcccggccgaggtaactttttaaattttgcaaaaccttaaatatacgtagttcaaaattcctcagatttttctttctcaattccggttgccttcggctgggcctctgaaggtaagtgaaggagaaacgaaccccgagatgcctatgagggctgctttttcacaggttctctatgccactggttaacatgacttagataagcacctgagaaaatgcaaaaataatgcttttctgttcaaaataataaatccaacttttactcttgccttaatttagaatcatcacaagtccacaagaaggaggctacacaatttctacaaggaacgctcagaaaataacgatgaagtgacctgacatactataagccactatggcacagagcatggaaactggcacactaagcaaagaagagaaggaagcagccagcaggggacgaagtgaaaggggtgtgaaatgagcagaggacagcagaggacaagagggaagctgggcatgacggccctgtaccttggtgaaggtggtggacccagaggccatgagaatctgacgcacgcggttgtggaagcgctgcattgactcatcgtccacacgcaggaaacactgagctgtgcgctccttagtaacctaaaccacaaagtcaaggttaacatgtccgaggaactcccacagaagcaagagccaactgtgcccaccactcaagtctttccacccaacaagactccggtgactgacccaggaagtgcaggcgcgttcatgtcactcccagccccgcccaggctgtacctcattctgcaggttccagaccccgtccttgtgggtgaactcctcatagctggtgcggcacttaggcaggatgcggcactcgaagccacacatgttgaacagcaggttggggttgtccttactgtacacagacacgaagctgttctcccactgaactgtagtcactgaccgtggcaagcggttcttgatgtcccagaataccgcccggcctctgcccacagagaacacatggtcacagcagtttcttggaaggaacttcccttcaaaggccaactgatgacatcctgacacagccacgcctctcccacccaggacgcagcctcaggtatgccctctctgggcccttagcttatgtccttccagctcacacagccccaacctagactcacaagttaacatcatgtttcatgaggcgcatgcgggcatctcggggccagcacttcttgttattatagccaacgatgttttcattattggggtcagggtgctctgtcaggtaacgttgaatcaggtcccgagcctcatctgctgtgaacctacaccagaccaggtacactgctgaggccccagtacactgagatttgggacacccacaagtcctccagctcaatagacggagaccccaccccatcctacccccaccctccccgggcttcattccattttatttttatttatttattttttgagacagtctcgctctttccccaggctggagcgcagcggcgcaatcccggctcactgcaagctccgcctcccaggttcacgcccttctccagcctcagcctccggagtagctgggactacaggcacccgccaccacgcccagctaattttttgtatttttagtagagacggggtttcactgtgttagccaggatggtctcgatctcctgacctcgtgatccgcctgcctcggcctcccaaagtgctgggattacaggcgtgagctaccgcacccggccgcttcattccattttaaagccccaacagcagttaagtcaactcaggtacaatagctgatttcagaggcaaagcacatgcctcagtaccctgcaaggctaggaatccaggaaagccctcacctgaaaaaaatatggatgcgatcaatgtatctgcagaagagacggatggggtgggcagcctcagtggctatgtcctggaaactgagaaagtcatttggcatctgagggggcccagccatctcactggcccggtgcaatcccaatacaagcaaatccatcaccaggccataatactgcacgatgaatgaggcaaactgcaggcctctgatgatcccatatgaattcgtatggttcatgtcctagaaagaaagaactacaattcttaagaatgtgagccatgccccaggattctccagagttaacctcttttgttctcccctcagcaaattctacttttttccactcccgaggcggagttgtgctcagtcacccaggctgagagtgcactggcgcaatctcagctcactgcaacctccacttcccgggttcaagtgattctcctgcctcagcctcccaagtagctgggattacaggcgcccaccaccacacccaactaatttttgtatttttttaagtagagacggggtttcaccatgttggccagactggtctcgaactcctgacctcgtgatctgcccgcctcagcctcccaaagtgctgggattacaggcatgagccaccgcacccagcctcctcctcagcaaattctgagtcagtgggccagacaagcactccacacacaattccatgctactgcgcctgagacgcaccttatagttgatgacgacgttgttcttggctgtcatgtagtcggctatgttgtggtccacgatgaggcgcagcagcctgttgagcagagtcaagtcgatcttctcatacatcttctcaaagcgggattccagcatgacattgcactcgccttcactcgtctcccacacgtcctgcaggttattgatgcctgaggagtagcaaggcaggtctccagcaggttagaaatcctcttgcaagactagccccacaggaactatcattaccttccataaccaatcccactatgattccacgtattcatttggattgctttgactatgggcttttcctcagtttaacacgaacactacttccctttactaccacgcatcaagagagtaaaccaatcatgctacccagatgagatttttgacgtagaactaaattcctgccccgttcctcacagggcgatctcatgaaagttctaccttgacaccacttgtaaacaagcagcggaggtggttctgtgtctgcaggcttaatccagggtgggaacaggcggcgcttgtcggcttcataccacaggtactggtccaggtaagcatcagttatcttctccaggggctcaacatcatatactggaacgaggtggctatacagatccatgaactcaatgcccacctgtgggacaaggaggctggttcacaccaatccaccaactgctacctttggtagaaccaaaggcaactgctacctttggtagaaccaaaaagaaaacttgggaggcctcactcacctctttgaaggctctctgtgtgaggaggtgacgcttgatgcgggacagcgcctcgtgggggttatcgtaggcctgctcgatcagacctagctcctccctctgagactggttcaaccgagacttcacactgacaaaagcaatgggaagggtgaatgggaaaactaggaggaagtaaaaccaggaaagactggggctacaccttctttctttggactctgaggatgacgccattccctgctgtcaccttcccagcaggaacctatctaccctactactcacctataagcttccttgagccgctccaatgccaagatgagcaacttggtgtcatgcttataggagagtggggggaatgggatgggtgaaaacctgcggctttccaaccaatgcactgtggtggtatatactgccactgcttcctccgctgtgatgtaaggcccgtcctgtaaggtggacatgaaattagcctcccgctacagcccgatcctgccagaacaaggttcagtcacaactctacagtcctccctcttgcccactcccccaccactcacacccagcccagcctactctgcccaaccttcaggtagttgtgctgccgctcctgttctgccttcagatagagccgggtgaggcggcccagattctttttacaaacagtcttgtccacagtggcccctcggcggatccgttctcggttgtagtgggcagtgttggtccaccagtcagccttggccttcacgtatcgaaggatcatattctctatgggcgtcggcagcccagggacctaaaagtccaaaaagcacaatcaagccaggatccagccaggcactgtggcacacatctgtagtcccggctactcaggaggctaaggaggatcgcttgagctcaggagcttgaggccagcctaagcaacatggtgcttcttttccctgtctaaaagggaaaagaaaagagattggagccagatagccccctaatgattcccgaagtggtaatcctaccctaaagacggatgtttacgcctccaaggaaataaagagacacccaccttccagggaatgttggctttccagcagcgccaggcttcactgaggtgctgcaggattgtccgggccttgttctgcttgatcccctcaggcatcatgtccagaatatcatgcatcacagctgcccgcagctcaaggtcaaaatgtgactccactcgctgctttgttactgtctttgccaccccctttgagtgtcgacctggaagtagagtgtcccaaggggattacaaggaagattccttgctttcaataagggtctctaccttcatgctcctcactcattatggttattaataaaattaggtattaacaaagcgtccctgtgcccagcatatgcaaaaagacgagctaccttaaacattcacaactatgcttctgaggaatttccactcctgcaaatgcatgactgcctctcaaggccccagaaggaagcccaagaaatagaatactaggtcagactcatttcagaactggacctaaaggcaatccagtaggaagagtgctcatacaagagcagggaacagactcaaacaggggcaggtacttttgaagcaataacaggagaagttggacacagagaaaaccactcaccttcaaactgccgggccaggaggttgccaagccatcgctctaataaaggggtaatgccacgcatgaaaaagagccagactcgccaaccggcagcccagaagccacagccaggacccttccctacagggccctacgatcccaagcagaagttaagaatacaagttagcaatgcatttaaacaacaatagaaacctgggcagaggtggggcatatatgtataatatacatacagaggaatgtaggtatggcagtagaggggtaaaaagaaaaaaaaactctgggacctcaacatctaaaacaaaagggtaaatgagaaaccttaaggcaaaaaccaggaactaagatcgcccatgtgaatttaaaggagcagtaaggacacagtcatagctgctctccaaataggtccctggaaagagccctgtctaaatgtatacatgaaaaaagatctgagaaagttaagtccagtgaggctgggcacggtgactcacgctggtaatcccagtactttgggaggccgaggagtgtggatcacctgaggtcaggagttcaagaccagcctggccaatacagtgaaaccccatctctactaaaatttcaaaaactagccaggcatggtggtgcgcgcctgtagtcccagctacttgggaggctgaagcaggagaatcacttcaacccgggaggcggaggctgtggtgagccaagatcgtgccattgtactccagctggggcaacagagaaagactcagtttcaaaacaaaacaaaaaaaaaattgccaggcgtggtggcgggcacctgtaatcccagctactcgggaggctgaggcaggagaattgcttgaactcaggaggcggaggttgcagtgagccaagatcgtgccattgcacaccagcccaagagacaagagtaagactctgtctcaaaaaaaagaaagtcagtaaagtcaaggtctcaccgtgttgaaacgataatagatgagatgcttcaggtccttgcacatgcgaatctgtcgcatcagcttgtatttgtatcgatacatgcccgtcaactgcccaacatgggcaaatatatactgcaatccatctgccagctgcaatacaattgccccatcagacctggagcttaaaccagctccacggtcagcacaggcttcctccagcgtcctcacccaggcaggggttgggaatacctaaccttacctggaaggcatccacattgcccagccgatactgcacgtgactatccaccaccagcttagtcaaacgcagaacttcccgacacaggtggaaagcattcccaaaacgagatttctttctttcctggagaagatgcaaaaaacagacagaacgtgaatgagcaatggacccaactgatgtatgccttcatcagtaaccagaggaaaacaactgtccgtccttgaagcccaggaggcccctagggtccaatgcaggcaccttggtggtgagcgttttcacaggcttgaggttgaagttgtagtccaggtgcaggtagttgaggtttttgcggtgaatgagaaggttgagcatgttgtagccctggcggcaaacctggagcccaacctccacccagtccagctttgtggactgaaagaatttggtggctttgaaggagcggaacaaatacctgaggtgggaacatggagagtaagagtcagcctactgatatctctggaacagaagtctgcgcagggcccctggggcaccttacctcttcttttgagccttagggggccgatgcttcagggcattcagcacatagtacttaagcagcttctggtaggagaccctcactttcacaggctgcccggcaggacaatgctcccgatacctggaaaaataagcccaccagagtttggccatctcttcttccagacactctgctaaaggctgcaagccttgggttgtctaccatttttatgggaaaaaaaaaaaaagaatttaaaaaaaaggctacatgcccacctagttggagtcttttctcctacacatccactatcattccccctgccacagggaaaaaccttaccagttcttgacaaggggtatgtccagggcccgacgggtgcgaccagagcgtaggttgaagggccgcggggcccagagcagggcaatgccattggctgtattgtctgtatagaggggtgtgtccttcaggaagggctccacaaactccgggagctcaaattcctcatcatcatccggcaatggttcctggctctgaaaaaggaatccctctaagggtttagctcctgctgaactaggcacagacttaagatgagggaaattctctggggccaagcacaaagcctgtatctgctatggaaactgggctgtctgacaaaagcagccctgaagtgccagcacaaaggaaaccaagacagcaaagaacaagacagggccaccaggaaagcaagcgtcacttctcacacctcaactggctgaccaccagaaagcctcccaatggagccccaacatcacaggaggtcaacattgcaatcatctcccacccaagctccaaacactgggcttggacacaacggaacacagatgagcatcaaaaacattatggtaagcttaagaagccagtcactgaagactacatagtgtacgattctatttcattctatcatatgaaatgtgtagaatagccaaatctatagacagaaagtagattagtggttgcgtaaggaagttggggagaaatggcgagtaactgctaagggtttctttctcaagtaataaaaatattctcaaattgcatgtcgtgacagttgggacaactctgagaataagctaaaaaccatcaaattacacactttaaatggataacttgtatggtatgttaactacatctcaatataaaggctaaaacaaacaaacacaatagagacagaccgggacagattatctagagcacccaagaaaagaaccgtaaagtccaaaaggataatcacagaaaacaggattataccaatgacatgttttaaagcaaatgctgaattctcatattcgcttatagctcaaggggaacacttagcaagacggaaaacacatctccctccacctgagcgtttagtaacatcagccaacctcacgcatttctcctagaagagctgagggaaagcatcccttcccttcctcaccttgactgagtgcctatgggagattgggttgatcaaagggtcaaagtagaaagctggcaagtcaggatcctcagttttgatgaatacaacattgggagtatggtacctaaaatgaaaggaagagtcagccaaagttttcccgccctggcccaacctaaacagcagccttctcctttccaaatgttgtgttccaggtctcttaccaggtgaggtggacatggtgtggaagattgttgtacaagtaaggaaaagcaatcttgtactcagtgcggataggctgccggatgataatcttgttaatatcattgaattcattccagtcttcatccctagggtacaacatcaagaataagcagacttttttttttttgagacagggtctcactcttatcacccaagctggaatgcaatggcatgatcatcgttcactgcagccgtgacctcctgggctcaaacaatcctcccacagctcagcttcccaagtaactgagactacacgaagctgtgagtgtcaccacgcccagctacattttttggtaaagatagggttttgccattttgcccagattggtctcaaacttctgggctcaagcaatcctcctgcctcagcttcccaaagtgctgagattacagcgtgagccactgcacctggtgtaaacagactaatttggaagttatatcaggactttaaggatcaagattacgtttcattcaactcaaaatgtctaaaatccctaatctctccaactcactgtaggttgatgtctcgaacaagaggttcaaatttggggcctccaggaatggccatattgagtgccttggacgtaaagaaggccttcaaatcaaacaggtagaagtagttgtcatccaccaagtctgtcaggagctgattagccaggcggtagagagtcgacatcataggtagtgtgaactgccagcgctggtaagtggagccatttacatacctaggtaaaaaatgaaaggcccacctcaagtaagcagctagacaaacccataccacctactgatctcccaggactccttctgcatttccagaactcctcccaggtgtagtatctccatctatcactcacttcctgctgtccctcaacggctggtggtcatagaaccagtccaacacaggggcgtcctcctcagggtccagctctagctgaatggcctccagtggctcaacatctaggatgttgtcagcatagtccaagggcggctcctcatcatcaaaagggggaaaacgcatcctcttgaaatgcctcctatctcttttttctcggcgcatcataatccacattgacctggaaggcaagacatcacacaaccatttctacccactgcctcccaaccaccaccaccaccaccacccaccatatttcagcctttctcacccccactgggagatgtagacaggttcaatgacccagggaatctcattgacgaaggaaatggctccagtgatgtggtacagcacaggcacatcccgaatctgctcccaaggcataggcatgttctccaggagtttgaggactgcgtggggcatgtactttagggcactggcacattagaaaaagagaaggctatcagaaatgacgaggtgttctgctacctgtcccatgcagagaagccacatgttcatgttccacagtcctaccttacaatccaaactcccaaacttagcccacaggcccttcctaaccagaaaccctgcctctccctctccaacttcaccttgcaccactcttcttaaacgtcataatcccacaatgctggtatcagctcctctaaatcaacggctatccctctggagacagctttgcggctctctcacatcctattccctccgcatcttcccataaatcataataaagtattcaccatacttcactatcaccagttgtctcatgtctgtcaggccactagaccgcacactgcagaaaggcggagattgttaccctctgctcgctactatatccccagcagccagcacagttctctaagtattttttgaaataaacaaaacttccagttcattacatggcaaacatttttgtgtccaaatagaacaggaatctgctaagacatctgtacctgtactagcccagtttagagccacagaaaaaacaggagtagggaaacctctgaaattaaataccccaaacacagaattcaggtccctgaggagcgacaggctgccactatgcacagtatcccactctggacttcaaccagctcaaccatagggacatcttatttttcattttttttttttttttgagacggagtctcgtactttcgcccaggccagagtgcagtggtgtgatctcggctcactacaagttccgcctcccaggttcacgccattctcctgcctcagcctcccaagtagctgggactacagacacctgccaccacgcccagctaattttgtgtatttttagtagagacggggtttcaccgtgttagccaggatggtctcgatctcctgacctcatgatccacccgcctcggcctcccaaagtgctgggattacaggcatgagccaccgcgcctggccagggacatcttataatatcatcaacaggacaaattaaagcaccagtcccagatcgggaagagaggggaaacagactgcaaaagtggaagatgtagaaattatcagagactcctactggttttctcctttctcttatatccaccaagatgagctgtcaaagcatcaatccaagactgtgggacagggagaagggaaaagggccaaattccaaatgaaattatttcaggatgttccttaccccaagtaaacccttttgtcatggcggaacttcctgttggtcatgtctccatggtctcgaatgatcttcctgacatgttctgggggcatgtcttccttctgggcatccacaaacccaaacttccgcttttctgcatagcgcttggcctgcaattgctgccattttcgagctggaaaggcacctcagtttaaaggcctgcacaccctccccctaatcctcttcacctcttgccctagggtaagctcctgtcagtgagtgtgagggagaagcaggcaccagcaggaagaagcaccccttgccaattcccttaccattttactctgtttttcctttcatcacattgatcactatctgacttttttttttttttttgagaggttgtttcactctgtctcccaggctggagtgcaatggtgcgatgtcggctcactgcaacctccgcctcctgggttcaagccattctcctgcctcagcctccccagtagctgggattatagacacgcgccaccacacacgactcatttttgtatttttcgtagagacgaggtttcactgtgttggccaggctggtctcgaactcctgacctcaggtgatccgcccgcctgggcctcccaaagtgctgggattacaaccgtgagccaccgcgcccggcctgacatttttattacagagcttcaaggttttgttattctctgtctctcccgctgtaatttaaaccccgtaaggacaggaattttgtctccgtcactactgtacccccgctggatcagcgcttgcaaataatacgcgcttaaaatgacttgatgaaaaattaactggaaataacaagggagctgacacctcaggagctgcccaaacggggagggtccccacccgcctgcgcgcgcgcacacccgccccgcctccggcccgcgcgccgctccacactctcgcctcacctttctcctgcagcttctcctccgacatgtagtccggtagcggggctagagggccaggcaccgggttacccggccctcgataaggaaacactccggccatatccggagaatctggggagcggcgggatagaaaaattcactaaccacaggcccgggcccacaagaagcgcagcagaaaggcgtccggggaccccggcctgcagtcccgccacacagtgcatccagccccgcccggcctaaccccttcggtcactcggcccgacccgaccacgcctcccgcagcccggccttaaacgcctgccacgcaccccacaggccctcacacaagaggccgctttccccgcagcgcaatggcggccagactgcgtccgctccgcgttcccagcgccgggaagtgcgcaacccgagttcagcagttgatccagtcggcgccgaggtgctcagatggattagtgagacgaccaattagagttgcacactgcgccgaggaggcgggcccataggcggaaaggctttgaacgcaagggggtgtggtcggggtgaagccccgcctcctccatttccgaggctgtttctggggcctctgacagacctcagcgtgtgatgggctcccggcgtcgcactgtgagagagcgaagtctaaagggtttgaataaatttgccaagattgcgcattgtacgatgtctgttgtcatcaatgtgtacatgcaatgcagtactagctcctggacagtcatttgttcatgcattcattcatttaaccatcactgtctaccgaggacgagggataaagcaggaaaaaagacaaccagtagagttcacaggggagcagaaaggcaggcaagaattaagaccttggccgggcgcggtggctcacgcctggaatcgcagcactttgggaggccgaggcaggcggatcacttaaagccagaagttcgaggccagcctggccaacatggtgaaaccccgtctctactaaaaatacaaacattagccgggcgtggtggcgggcgcctgtagtcccagctactcgggaggctgaggcaggagaatcgcttgacccgggagggggaggttgcagtgagccaagatcgcgccactgcactccagcctgggtgacagagcgagactctgtctcgggggaaaaaaaaaagtctgaaattctgtggagggtgcagaggaattgtaacccatacagcccctgaatctagttgagaatttacaaatcaaagtgaaataattagaaaaaaattcaaaggatgtcaatgtgctttcagaacggtaaaaatttaaaaaatattccttttgtttttttgagacagggtctcactctgttgcccagactggagtgcaatggcgcgatctcaattcatcacaacctccacctcccaggatcaagcaattctcctgcctcagtctccagagtagctggattacaggcacgcgccactactgccggctaagttttggatttttagtagagacagggtttcactatgttggccaggctggtctcaaactcctgaccttacgaaatcctcctgcctcggccctcccaaagtgctgggattacaggcgtgagcccccatgcccggcctgaaatctattttttaatgctgggtgttctaaaggtccctacagtcaaaaaagacagaggagaattgttaaagatttgatggagatggatggatgtgaggatttcataaaggtaaatggagaggaaggaaaaaggtaatcccaagtggtagaactactagaaagagttaagaaagaagccgggcaccgtgactcatacctgtaatcctagcacgttgggaggcagcggcgagaggattggttaaactcatgagtttaagactagcctgggcaacatactgagaccctcatctctacaaataataaaaatattaaccaggcatagtggtacatgcctgtagtcccagctactcgggaggctgaggtgggaggatcatgatggcaccactgcactccagcctgggtgacagagcgaggctggtttcatagaaaaaaagtgggggttttggtttgttttttgttttttgaggcagagtctcactctgttgccaggctggagtgcagtgtcacaatctcggctcactgcaacctctgcctccaggattcaagcgattctcctgcctcagcctcctgagtagctggggttacaggcatgtgccaccacacccggctaattttgtatttttcgtagagatggcgtttctccatgtttgtcaggctggtctcgaactactgagctcaagtaatctgcctacctcagcctcgcaaattgctgggatttcaggcgtgagccaccgtgccaggccaaaaaaggtttagatatagaaactaacatggcatgctctgaaaataggcaccatatcaatctggctgtgctagaaagtccaacatcatcattatcatcttcatcatcatcatcgtcatggtagtgaagtcctttcacctgtgtaaggttcactacgtgccagacattgctctaagccctggtgaaatcctactatggtctgtagtttcattaagagtattgtggccgggcgcggtggttcacgcctgtaatcccagcactttgggaggccgaggctggcggatcacaaggtcaggagatcgagaccatcctggctaacacggtgaaaccctgtctctactaaaaatacaaaaaaattagccgggcatggtggcacgcacctgtgcttcgagctacttgagaggctaaggaaggagaatcgcttgaacccaggaggtagaggttgtagtgagctgagatagtcactgcactccagcctgggcaaaagagcaagactccgtctcaaaaaagaaaaaaagagtattgtaccaatgtcaatttcctggtttgattgtcgctctatggttgtataagaagttctggggggtggccgggcgcggtggttcacgcctgtaatcccagcactttgggaggctgaggagggtggatcacgaggtcaggagatcgagaccatcctggctaacacggtgaaaccccatctctactaaaaatacaaaaaaattagccgggcatggtggcaggcgcctgtagtcccagctactcgggaggctgaggcaggagaatggtgtgaacccggtaggcagaggttgcagtaagccaagatcgggccactgcactccagcctgggtgacagagcaagactccgtctccaaaaaaaaaaaaaaaaacaagttctggggggtgggcagggggcaggtgtggtggctcacgcctgtaatcccagcactttgggaggctgaggcaggtggatcatttgaggtcaggaattcgagaccagcctagccaacatggtgaaaacctgtctctactaaaatacaaaaattagtggggcatggtggcacatgcctgtaatcctagttacttgggaggctgaggcataagaatcgcttgcacccggaggtggaggttgtagtgagctgagatcatgctattgcactccagcttgggtgaccgagtgagactctcgctcaaaaataaaataaaataaaaagttctcaagctacgtgaagggtacacaagaactctctgtactattttcaaaacagcattattgagataaaagttgcactccatggccaccatgctggctcatgcctgtaatcccagcacattgggaagtcgaggcgggcggatcacctgaggtcaggagttcgagaccagacgaagcaacatggtgaaactctgtctctactaaaaatacaaaaattggcggggcatggtggtgcatgcctgtaatcccagctacttgggaggctgagatgtaagaatcgcttgcatctggaggcagaggttgcagtgagctgagatcgcgccattgcactccagcctgggcaacaagagcgaaactctgcctcaaaaaaaaaaaaaaaaaaatcgcaatccataaagttcgcttgttttcatgtgtataattcaatgattgttaatgaattttagttttaatgattcaaaattagtatatttacagacttgtgcagttaccactattgagttccagaacattcccagcaccccccaaagaaatcttttttatttatttatttatttatttatttattttttattgataattcttgggtgtttctcacagagggggacttggcagggtcataggacaacagtggagggaaggtcagcagataaacaagtgaacaaaggtctctggttttcctaggcagaggaccctgcggccttccgcagcgtctgtgtccctgggtacctgagattagggagtggtgatgactcttaacgagcatgctgccttcaagcatctgtttaacaaagcacatcttgcaccgcccttaatccattcaaccctgagtggacacagcacacgtttcagagagcacagggttggaggtaaggtcacagatcaacaggatcccaaggcagaagaatttttcttagtacagaacaaaatgaaaagtctcccatgtctacctccttctacacagacagggcaaccatccgatttctcaatcttttccccacctttcctgcctttctattccacaaagccgccattgtcatcctggcccgttctcaatgagctgttgggcacacctcccagacggggtggtggccgggcagaggggctcctcacttcccagtaggggcggccgggcagaggcgcccctcacttcccggatgggggggctggccgggcggggggctgacccccccacctctctcccagatggggcggctggccgggcagagaggctcctcgcttcccagtaggggcggccgggcagaggcgcccctcacctcccggatggggcggctggccgggcggggggctgacccccccacctccatcccggacggggcggctggccgggcagaggggctcctcgcttcccagtaggggcggccgggcagaggcgcccctcacctcccggacggggcggctggccgggcggggggctgacccccccacccatctccctcccggacggggcggctggccaggcgaggggctgacccccccacctccctcccggatggggcggctggccgggcagaggggctcctcacttcccagtaggggcggccgggcagaggcgcccctcacctcctggacggggcagctggccgggcgggggactgacccccccacctccctcctggatggggcggctggccgggcggggggctgatgccccgacctccctcccggacggggcggctggcctggcggggggctgacccccctacctccctcccggatgggcggctggccgggcagggggctgacccccccacctccctcccggatggggcggctggtggggcggggggctgacccccccacctccctcccggatggggcggctgccgggcggagacgctcctcacttcccagagggggcggctgccgggcggaggggctcctcacttcccagacggggcggctgccaggcggaggggctcctcacttctcagacggggcggccgggcagaggtgctcctcacatcccagacggggtcgcggccgggcagaggcgctcctcacatcccagatgtgatggcggccgggcagaggtgctcctcacttcctaggtgggatggcggccgggcggagacactcctcactttccagactgggcagccaggcagaggggctcctcacatcccagatgatgggcggccaggcagagatgctcctcacttcccagacggggtggcggccgggcagaggctgcaatctcggcactttgggaggccaaggcaggcggctgggaggtggaggttgtagcgggccgagatcacgctactgcactccagcctgggcaccattgagcactgagtgaaggagactccatctgcaatcccggcacctcaggaggccgaggctggtggatcacgtgcggttaggggctggagaccggcctggccaacacagcgaaaccccgtctccaccaaaaccagtcaggcgtggcggcgcgagtctgcaatcgcaggcactcggcaggctgagtcaggagagtcaggcagggaggttgcagtgagccgagatggcagcagtacagtccagcttcggctcagcatgagagggagactgtggaaagagagggagagggagaccgtggaaagagagggagagggagaccgtggggagagggagagggagaggagggagagggagagggagagggagagggagagggagagggagagagcaaagaaatcttctacacattcgctcccccatttcctcctacctcctattcctcagccctaggcaactacttttctgttttccatctctatagattcacctgttctcaacattttatataaatggtatgatagaataatgaatttttttgtgtgtggttgtctgcttttacttggcataatggttttgtggttgatgttgttgttgttatttgttttttagaaatgaaggtctcactctgtcatccaggctcaagtacattggtgctatcatagctcactataacctcaaactcctgggctcaaagggtcctcccacttcagcctctagaatagctaagactgcaggtgcatgtcactaagcctggccagcatgatgttttatgatgtttttgaggttcatacttgttatattgttatggcatgtatatcgtctttggataaatatgtattcagatcctttacccattcttttttttttttttgagatggagtctcgccctgtcgcccaggctggagtgcagtggtgtgatcccagctcactgcaagctctgcctccagggttcacgccattcttctgcctcagcctcccgagtagctgggactacaggcacccgccatcatgcccagctaattttttttttgtatttttagtagagactgggtttcaccgtgttagccaggatggtctcgatctcctgacctcatgatccacccgcctaggcctcccaaagtgctgggattacaggcgtgagccaccgcgcccggccttttttttttttttttttttttttgagatggagtttcgccctgtcgcccaggctggagttagtgcatggagtgcaatggcacaatctcggctcactgcaacctctgccttccgggttcaagcgattctcctgcctcagtctcccaagcagctgggattataggttcctgccatcacaagcccagctattttttgtctttttaatagaaatggggtttcaccatgttggccaggctggtcttgaactcctgacattgtgatttgtcccccttggcctcccaaagtgctggaattacagatgtgggccacggcgcctggacttttttttttttttttttttttttttgagatggagtctcgctctgttgcccaggctggagtgcaatggcgcgatctgggttcactgcaacctctgcctctggggttcaagtgcttcttctacctcagactctggagagtagctgggatcatgcaattgcaatccagcctgggcaacaagagcgaaactccatctcaggaaaaaatgaaaaaaaaaaagagagagaagcttgatgagttggactttattctcctgcctcagcctcctgagtggctgggattacaggcgcatgccaccacacccggccatatctcattatttaattgacgattttcatttttttcttttctcagtttgctctttctggatcttccgttattttgatgttgggtcttttggactggtcccacgattgtctcatcttttctaattctatccccatcattactcttctttccgggagactttcttccaactcctccatgaacttttcatttccatcaagtgtcacacttttcatttccaaatactaagtactctttcttagtttttttttttttaaaaaaaacggagtcttgctctgtcgcccaggctggagtgcagtggcgcaatctcggctcaccacaacctccgcctcttgggttcaagcgattctcctgcctcggcctcccgagtagctgggggttacaggcgcctgccaccacgtccagctattgtttgtatttttagtagagacggggtttcaccatgttggccaggagggtcttgaactcctgacctcatgatccacccgcctcggcctcctgaagtgctgggatgacagacgtgagccaccgcacccacctctttttagttcttcttttgtaggatcatgttcttgtttcatggctacaacatactctcttgtctctataaggaaaatagcttttctgaagttttattctccaggcatactgtttgctttatccgtgtttttctttttcttcatcttcttttaaaaaagtttatttcatgttaggggcttcctttaaatgtccataattggctcttcaattaaaattatagtaagtgcttccaatgagaagtccagagatctcacctgattttatgaaaagagtcatagaagtttttttgggaaaagagatgttgccgtgggtcactcctgtaatcccagcactttgggagacgaaggcaggaggatcacttgaggtcaagagttcaagaccagcctgggcaacatgacgaaacctcaacacaaaaaatacaaaaatttgccaggtatggtgtctcacgcctgtagtccccgctactcaggcctgaggtggaaggatggctggagcccagcaagtggaggctgcagtgagccaagattgtactggagactacactccagcctgggcaacagaatgagatcctgtctgaatttgaaaaaaaaaaaggccgggtgcagtggctcatgcctgtaatcccagcactttaggaggctgaggtgggcagatcaaaaggtcaggagttcgagaccatcccggccaacgtggtgaaacccctgtctctactaaaaacactaaattagccaggcgtggtggcgggtgcctgtaatcccagctactagggaggctgaggcagtaaatcgcatgaacccaggaggaagaggttgcggtgagctgagatcacaccactgcattccagcctggtgacagagtgagacttcgtctcaaaaaaaaaagaggagatgttgtaaataagcactgcaaaatgagaatgtgtaagacaaagggagtgagtaggaggagggaagccaggaagatggaagtgagggagaaggaaagcctaccaggcgctgggcaatgaaataggaatagatttctgaataaggaaggagcatggtgtatttaataaatgaactaaggccacagagactgaaacgggctgggtgtggtggctcacgcctgtaatcccaacacattgggaggccaaggtgggcagatcacttgagtcctggagttgaagaccagccgggtccgcatggcagaaccccatctttactaaaaatacaaagaaaaaaaatcagctgggcgtgtggtgtgcacttgtagttccagctacccaggaggctgaggtgggaggatcgcttgaacctgagaggcagaggttgtagtgagccgaggtcgcaccactgcaattcagcctgagtgacagagcacaaccccgtctcaaaaaacaagagtgggccggacacagtggctcatgcctgtaatcccagcactttgggaggcagaggtgggcagatcatctgaggttgggagttcgagaccagcccggccaacatggtgaaacctgatctctactaaaaatacaaaaattagccaggtgtggtgggaggtgcctgtaatcccagctacccaggaggctgaggcaggagaattgcttgaacccaggaggcagaggctgcagtgagctgagatcacaccactgcactccaacctgggcaacagagtgagactctgtctcaaaaaaaaaaaaaaaaaaagaatgaaataggaagtaccctgagtctggtgagtggacaagaggggagcccttggaaggccacagaccatgtgatgagttatgcttctttcttaagaagtaggaagagctactgggaatgacatgatcagatttgcatcgtgacaatcacagactggctgttctgtggagaatagttacgaggccattattattattattattatcattactattattattattattttatttatttattttttgagacagagtctcactctgtcgctcaggctggagtacagtggtgcgatctctgctcactgcaagctccgcctcccaggttcatgccattctcctgcctcagcctcccgagtagctgggactacaggcgcccgccaccacgcccagctaattttttgtatttttagtagagacatggtttcaccgtgttagccaggatggtctcgatctcttgacctcgtgatccgcccgccttggcctcccaaagtgctgggattacaggcatgagccaccctgcccggccagccattattatgtcgcttagactagagatgatggtgactcggaccagatgggacagcggagatggaaaggatggatgggtgggaaagccgtcctgcaataactggaagtgtgcatctgtggtgggaggtgggtggcattgttcagggacgactcctcagttcccgatttgcacagtgcgtcgatggcagggtcatgcacagactgagtggactggatgcaggtttggaaggaaagcgcctgagtcgggttctggagaaccctttggatgtcagaatgcaaccatcccatcctctagattcatctgctcattctcaggctacaggtacttgaatgacctgtttcttcagtttctttttcttttcctttttttttgagagacaggatctcactctgtcacccaggttggagtgcagtggtgcaatcttggcttactgcaacctctgcctcctgggttcaagcgattctcccacctcagcctcctgagtagctgggattacaggtgcataccaccacatctggctaatttttgtaattttagtagagacagggtttccccatgttgaccaggctggtcttgaacctctgacctcaagtgatccgtctgcctcggcctcccaaagtgctaggattataggcgtgagccaacgcacccggccaaggatgacctgtttctgtatctgtcacccctggtttccctctgccgaatgactcctactttctcagttcctcactctctaacacagtcctgagtgcaggctctctgatgccagggctctggttcattgactcactattacacctcatagtttgtgcttggcatgtcgtaggccctttataaatatttgttataaagagaataaagtcagctgggcgaggtggctcacacctgtaatcccagcactctggaagaccgaggtgggcgcatcacctgaggtcagaagttcaagaccagcctggccatgctgaaaccccgtctctactaaaaacacaaaaaattagccgggcatggtggctggtgcctgtaatcccaactactcggaaggctgaggcagaagaattgcttgaacctgggaggcggaggttgccgtgagccaaaatagcgccattgcgctccagcctgggcaacaagagcgaaactccgtctcaaaaaaaaaaaaaaaaaagagaataaagtctgggtgcggtagctcacgcctgtaatcccagcaatttaggaggccaaggcgggcagatcacttgagaccagttcaagacctgcctggccaatatggtgaaacctagtctgtactaaaaatataaaaaacagccgggcatggtggcaggtgcctgtaatcccagctactcgggaggctgaggcaggagaatcgcttgaacacaggaggcagaggttgtagtgagccaagatcgcaccattgtgctccagcctgggcaacaagagcaaaactccatctcaaaaaaacaaacaaaaaaaagacagagaataaagaaaaatgaactgtcccagtgatacttggagccacagagtaaattggcacatcttccttaaatcataaaattgggccgggcgcggtggttcacgcctgtaatcccagcacttttggaggccgaggcgcgcagatcatgaggtcaggagatcgagaccattctggttaacacggtgaaaccccgtctccactaaaaatacaaaaaaagttagccaggcgtggggccaggcacggtggctcacgcctgtaatcccagcactttgggaggccgaagcgggtagatcacgaggtcaggagatcgagaccatcctggctaacatggtgaaaccccgtctctactaaatgtacaaaaaattagctgggcgtggtggcaggcgcctgtagtcccagctactcgggaggctgagacaggagaatggtgtgaatccgggagacggagcttgcagtgagccgagatcgcaccactgccctccagcctgggcgacagagcgagactccgtctcaaaaaaaaaaaaaaagaaaaaaaaattgacagtttcacttgtcattttgtaaaattttttttaaaaacaagtattgtaattgtatttgaaatggtattttattttatctttttaattttttttacagacagactccagactccactgttgcccaggctggagtgcaggacacaatcatgacttactgtagcctccaactccaggaggctgagtgacctcccacctgagcctcctgagtagctaggactgtagatgtgtaccactgtgcctggctttttttttttttttttttgagatggagtctcattctgtctgccagactggagtgcagtggcacgatctcggctcactgcaatctccgcctcctgggttcaagcaattctcctgcctcagcctcccgagtagctgggactacaggagcctgccatcacgcccagctaattttattttattttattttattttattttattttattttattttattttattttattttttgtattttagtagagacgaggttttaccatgttgcccaggctggtctcaaactcctgagctcaggcagtccacccatctcggcctcccaaaagtgctgggattataggcatgagccaccgcacctgaccacctggctaatatttttattatttgtagagatggggctctcactatattgcccaggctggtctcaaatttctggactcaagtcatcttcccgccttggcctcccaaactgctgggattataggcgtgagccaccgcagccggacttatatgaatttttagattcaacatatttcaaggaaatgctgctgcagtggccctagactgtttccctcccccatctcctccatctccccagcaccccactcctgtttgctgttgaggtggaaatatttggattccacacagtcggggttggggaaggaaggggaggagtttgaagaaaacgatgtttggacaagccgtaaggagagcaagtgaatagctaggtagcagggctggcctgcgtcagtgcagcaggaatttgtggccctccagttctgcaggcttctctatcctcttctagcagtgccctgacctgggatctgaggcagagagagttgccatgccagcctctcaagccccaggattagcaatgccaaccggtgaaggtttaggagatgagggagtgctcttaagggcacagactggcaggccagagtgaggggcaaagcctcagccaaagaaattatttactatcggccgggctcagtggctcgagcctgtaatcccagcactttgggaggctaagtcgggcgaatcatgaggtcagaggatggagactatcctggctaacatgctgaaaccccatctccggctgggtgcggtggctcatgcctgtaatcctagcacttttggaggccgagacaggcagatcacgaggtcaggagatcgagaccatcctggctaacacagtgaaaccccgtctctactaaaaatacaaaaaattagccgggtgtggtggctggcgcctagagtcccagatactcgggaggttgaggcaggagaatggaacctggcaggcagagcctgcagtgggccaagatctcgccactgcattccagcctgggcttcagactccatctccaaaaaaacaaaaacaaaaacaaaaacaaaaaacaaagaaaccccgtctctactaaaaatacaaaaaattagctgggcatggtggcatgtgcctgtagtcccagctactcgggaggctgaggcaggagaatcacttgaacccgggaggtggaggttgcagagagccgagattatgccactgcactccagcctgggcaacagagtgagactccgtctcaaaaaaaaaaaaaagtatatgttccacagtaccaagctaagtgatgttcatgtctacagaggaaagctgaaatgaacctctgccctccacaattactgcattcctgaaaagtgcagaaatcaatacttgaccataggagtctgccttttttttttgagacagagtctcgctctatcgcccaggctggagtgcagtggcaccatctcggctcactgcaagctccgcctcctgggttcactccattctcctgcctcagcctcctgagtagctgggactacaggcgcccgccaccatgcccggctaattttttgtatttttattagagacggggtttcactgtgttagccaggatggtctcgctctcctgacctcatgatctgccagcctcggcctcccaaagtgctgagattacaggcgtgagccaccgtgcccagcctagagtctgcctttcaaactgaaacaccctgacttatatatatcacttcagaggcaatttatccgacttgatggatgtttagttgtcagctgactcctacctttctaccttgaaatttctccactctgtggcctttctataaagaaagaggcaaaatagtgtataggaaagagccctgaaccaaaccaaagacctcgattctgattcgggctgtgctacagactagctgagtatgcttggataagtcacttaacctctctaggcttcagttccttcaattctctgcaaaatgaaaagaacagactggataatctttttttttttttgagatggagtcttgttctgttgcccaggctggagtgcagtggcgcgatcttggctcactgcaacctccacctctggggttcaagctattctcctgcctcagcctcccaagtaggtgggactacagggacctgccaccacacctagctaatttttttttttttgagatggagtctcactctgttgtccaggctggagtgcagtggcacgatctcagctcactgcaagttccgcctcccaggttcacgccattcccctgcctcagctgcagctgggaccacaggtgcccaccaacacgcccggctaatttttttgtatttttagtagagatggggtttcgctgtgttagccaggatggtcttgatctcctgacctcgcgatccgcccgcctcggcctcccaaagtgctgggattacaggcgtgagctaccgcgcccggcctcaccttagttatttttgtatttttagtaaagacaggatttcaccatgttggccagtctggtctcaaactcctggcctcaagtgatccgcctgcctcggcctcccaaggtactgggattacaggcatgagccaccatgccccagcctgtttgttttttcatctgaaagatggaatgagaacaggtgcagtgactcatgcgtgtatcccagcactttgggaggccaaggcaagaggatcacttgagcccagggattccagaccagcctgggcaacatggtgagactccctctcacacctataatctcagcgctttgagaggccaagggaggagaattgcttgaggccgggagttggagaccagcctgggcaacatggtaagaccccatctctggaaaaataaaaaaagattttttaaattagccaggcatcgtggcacacacctgtggtcccagctactcaggaggctgaggtgggaggatcgcttgagcccaggaggtcaaggctgcagtgagccatgtttgtgcaactgcactccaacctgggtgacagagtgagaccctgtctcaatttaaaaaaaaatggctgggcgcagtggctcatgcctgtaaccctaccactttgggaggctgagatgggtggattgcttgagcccagcaatttgagaccagcctggggaacatggtgaaaccctgtctctatttaaaaaaaaaaaatgtatctgggtgtagtgatgcatgtctgtaatcccacctactcaggaggctaaggcaggaggatcgcctgagcccaggagccaggagttggaggctgcagtgagctacgattgcaccactgtactccagcctgggtgacagggtgagaccccgtctcaaaaaataaaaataaaaacaaaagatgaggtgaagctctgttgtgtgagattaaatgggataatgtgtaaaaggtgcctgatggccaggcacggtggctcacgcctgtaatctcagcactttgggaggccaaggcaggcggatcacgaggtcaggagtttgaaaccagcctggccaacatggtgaaaccctgtctctaccaaaaatacaaaaaaattagctgggcgtggtggcgggcgcctgtaatccctgctactcaggaggctgaggcaggagaatctcttgaaatcgtaaggcagaggttgcagtgagctgagatcacgccactgcactccagcctgggcagcaagagcaaaactccgtctcaaaaataaataaataaaattaaataaataaataaataaataaaaggtgcctgacatggggaaggggcacgacaaatgttcggccgaggatgctcctaaataaatattcatttcaacacaagagctcctctctaaagagtaacttcccttacatagttttttgcaaaatgaggacttctaattttcagcccaacaaaatccagattttatgtgataaagttttgacagttcagttatgaagttttctgttgactcaggattaatttggctacaagattcttttggtttcaacccttggcactgaaaatcattctgcaggcccggcgcagtgcctcacgcctgtaatcccagcactttgggaggtgaggcaggtggatcacctgaggtcaggagttcgagaccagcctggccaacttggtgaaaccccatctctactaaaaatataaaaattagcagggcgtggtggctcacgcctgtaatcccagcactttgggaggccgaggtgggcggatcacaaggtcaggagatcgagaccatgctggctaacacggtgaaaccccgtctctagtaaaaatacaaaatattagccgggcgtggtggcgggcacctgtagtcccagctactcgcgggggaggggggcgggcggaggggaggctgaggcaggagaatggcatgaacccgggaggcggagcttgcagtgagccgagatcgtgccgctgcactctagcctgggtgacagagcgagactccatctcaaaaaaaacaaaaaaaaagaaagaaaagaaaatcattctaaactctgaatccggctgggtgtgatggctcacgcctgtaatcccagcattttgggaggccaaggtgggcggatcacttgaggtcaggagttcgagaccagcctggccaacatggtgaaaccccgtctctactaaaaatacaaaaattagccaggtgtggtggtgcacgcctgtagtcccagctactcgggaggctgaggcatgagaaacgtatgaacccaggaggtggaggctgcagcgagctgagattgagccactgcactccagcctgggtggcagagtgagactctgtctcagaaaaaaaaaaaaaaaaaaaaagatgaggttttgctatgttacccaggccagtgttgaacgcctgggcccaagcctcagcctcccaaagtgctggaattacaggaatcaaccaactcgcctgacactggatttgctttttttattttttcgaaacagtcttgctctgtctcccaggctagagtgcagtggtgcaatctcagctccctgtaacctccacctcctgagttcaaatgattctcctgcctcagcctcccgagtagctggcgttacaggcgcctgccaccacgcccagctaatttttatacttttagtagagatgagggttcaccatgttggccaggctggtctcgaacccctgacctcaagtgatccaccagcctcagcctcccaaagtgctgggattacaggcatgagccactgcacccagccaggagttgctttttgattatagagggtatcaggacacgtcagggtggaaactttcccaaggcaaagcctccacaatctagcatcgaattgtaaatcaggacaccattggagccaaaaagtaactcaaagtaaccacgctcataagagattgatgcaactaatgcaattatttgcatagcaatttattaatttataatcaggatagtgtttcaaggccataaaatatcaatgtatcccatccagaaaagccccttccctgtcctggaggacaaagaaatcattagcaagtagcttggtagacatggagtccgtcttgaggaccatttccctgggccacggtaaagtctggcgaagcaccactgtgctaagcagactcctaccaaatggagcatctggcaatctctgctttttttttttttaacctctgcatttttgaacgtcctttttttagggtcttaattgaccattcttctttgattcacatcatctttatgttgcccacactccaattctctgcctacttactcagttgtaatcacaatccagtcctgccttcctcaagtttcactggctcaccatggtagcaattcgtgtgtggtcccaaattcttccaagcgtccactacatcctgccccacctgggagctgacctcactcttcctgtatgggcttgactagttaatccacagaaacagccatgtttccctaatggtcaagttcttgggcagccttcatagacactatctatctatctatctgtctatttatttatttatttattttttaagacggagtcttgctctgtcacccaggctggagtgcagtggcacgatcttggctcactgcaagctccgcctcccgggttcatgccattctcctgcctcagcctcctgagtagctgggactacaggcgcccgccaccacgcccggctaattttttttatttttagtagagatgggatttcacctgcctcggtcccccaaagtgctgggattacaggcgtgagccaccacgcccggcctcatagacactatcaagtattaccaaaagggacactcactcaaaccatcatgaatgtataccagtggccaaagaaaaggtgtatgacttagaatcaattcatatcaacctcaacagatatttaaggaatagattcctcacatgagtttgtcatatttctttttctttaaaaactcaaggcagacaacatttttgttaatcaaggcattcagttaagatggcaaattgagttttgcagatatgacttttttttttaattaaaaatttttttttggccgggtgtgttggctcacgcatataatcccagtagtttgggagcccaaggtgggcggatcacctgaggtcaggagtttgagaccagcctggccaatatggtgaaatcctgtctctactaaaaacacaaaaattagccgagtgtggtggtgggtacctgtaatcccagctactagggaggctgaggcaggagaatcacttgagtccaggaggtggaggttgcagtgagccaagattgtgccactgcattccagcctgggcagcaagaatgaaactgtctcaaaaaaaaaaaaaaaaaaagaagaaaagaaagaaaaaagaaaattttttttttttgtagagaggaggtctcaatatgttgcccagactggtcttgaactcctgagctcaaccactcctcctacctcggcctcccaaagtgctgggattacaggcgtgagccaccatgcccagccagcaaacatgacttctagaagtacagactctgacaaaattctgcattgtttctctagctcactatctatacctttgcctcttgggtttttatctaattacatttaaatgctctgctcttattttctgcttgtgtttagctccttccaactgtgttttcctcagtctcgatgtattttcatcctttgcgcctgtttttatgactctatgatggagacttctcacaatccctctcatttttttttcacacctgtatttttcctcctcttttcatttctgggttcctgcctcttctttgttctttggatattcaatttttttttttgagacggagtctcactctgtcacccctgctggactgcagtggcactatctcggctcattataacaacctcggcctcccaggttcaaacgattctcctgcctcagcctcctcagtagccgggattacgggcgcctgccaccacgcccggccaattttttgtatttttagtagagatggtgtttcaccatgttagccaggatggtcatctcctgacctcgtgatccgcctgcctcggcctcccaaaatgctgggattacaggcgtgacccaccatgcccagcctggatatttaaattgttctgtgctctcctccttttttttctctctgtgattctctttgtcagctcctttgcctatatttgcatctcagttgacacccctgattctgacttgtccttatcttcctaccagtctctgccgaccggttactgtcagcctgtctttagggtttgcgctgcagctgtttgtcctttgtctttctgcctgcctccaagtccccatatctcctggtctcttctgtcagtgaatcttcccactgactgcctcctccgccttctgcttctcagctccccggactcgtccccgctcttctctgttcccacctctcctcttgctcttctgatctctctatctgccagtatttcctccatcactcctgagcctgggtgtttctccttgtcactcactctatttcactgtctagactctctgtgcctttcagccttggggtctcttcttgtcggccttcatttctatttttctggtcctttttgtttataacccttttatcagttctgtgactttggtgtctctcaggatctatgacagcctttctccatatttctgctagggcctgtctcttttgccctccatccttctttgcctctgtcacctctatgtgaataatccttctctctttctatctatcactcaatctatgtatgtctgtctctgtcattcttcgtatctttctgtacctccgcttcttagcaaggtttttgttttgttttgtttttttttgaagacaatcttcctgtctcttgcttttgctcatgtagcttttctgtggatggctaagggttgcctctctcagtccattgtttagtggaacagcagacttaatctgctgggcacttcccgtcacctcgatgttctgggaaggaaggggtcttgttcaacagaaaaaaacgcagcagaagcagcagggaggaagaagactttatgaatgtatctcagaaaagtcccagctcttccttttttttttttctttagagacaagagtctcactctgtttgcccaggctggagtgcagtggcacgacctcggctcactgcaacctctgcctcctgggttcaagcgattctcctgcctcagcctcctgagtagctgggattacaggcatgcaccaccatgcccggctaattttgtatttttagtagagacagggtttcaccatgttgaccaggctggtcttgaactcctgacctcaggtgatcctcccgcctcggcctcccaaagtgctgggattacaggcgtgagctgctgcgcccagccagagggccagctattcctttatcctcctgcagccttctctcacacagtctacctctgcccttgttcttccatgaaagcctgggcctgggaaaactctgtactgggcacctttccttctgtaattctagacttcagtgccgtcctaagaagacaaaccagccctgtgttcattcctctaagaatccgaattgtctttgaaaagtcaaaaggggtcgggtacggtggctcacgtctgtaatcccagcactttgggaggctgaggtgggtggatcacttgagtgcaaaagtttgagaccagcctgggcaacatggcaaaacctggtctctacaaaaaaatacaaaaattagcctggtgcagtggcgtgcacctgtagtcccagctacttgggaggctgaggtgggaggcaggagaattgcttgagcctgggaggcagagattgcagtgagccaagatcaagccactgcactccatcctgggcaacagagcaagaacttgtctcaaaaaaaaaaaaaaaaaaagaaaagaaaaaagaaaagtcaaaagatactaaaaataaaaataaaaataaaaggctagacacagcaggaccagggttaaggagaaaaacaggagtgtgcgcctgttctcacgtctgtaatcccagcactctgggaggccgaggcaggtggattacttgaggtcaggagttcgagaccagcctgggcaacatggtgaaacctcctctccaccaaaaaatacaaaaattagctgggcttggtggtgcatgcctgaagtcacagctactcgggaggctaaggcaggacaatcacttgaacccaggaggctgaggttgcagtgagccgaaatcgtgccactacactccagcctgggtgacagagtaagattccgtctcataaaaaaaaagaaaaagaaaaagaaaaacaggagtgtggctttgagaaccagaaacatcagcagcaattgctgtggcccaggttctgtctcttggcaactatcacgtccatctctgctgctacagatagcacctcctctaccttcctcccactgccagaatttggttataggtgagatctcttttctctctgtccccacccgccccataccagatctctctgatcctagtgggacttcaccttcccccatctgtccctgggttaaagcaaagagcttctgtctccactggcagtttcttccagctgcatgcctcctgccaccctttactgatagctctagctgtacctcttgagtttatttgctggaaaggatgctcatctgatgacggatttcagtgaacagaaacccaggttcccacccatccaacatcagcatttcttcttagatccgaggaaggggaagggatgtgagttagctggaagagaaactgagattctgatgagcaagtctggccctcaccctgatgggggactgtgcatggaagaccctcatctccttgtcctggccccacctcccccagcgaggggcccatggcttctctctagtctttcaggctgagagtcgaactgttgctggtgacaggtccattgtcacgacgtgtcctggtccccctggttttctcatggccagggctgggtggatggggtcgagactgtaggacatcattgaccagaatacggatccccaatatgatgctcatgatgcccacagtgaccagcccaattccacccagggtgaccagagcaagaggaacctggtggtgctgccggaacagccacagactcatccaccccagcgggaccaggcggaagagggccaaggtggccaaggaggcccagctggtcacgctgaaggccagggatggggcctggcgagaaagcaacagcagcttccgcaggtgcaagcaggcagagttcagttccaggagcagagacaccatggagaagcccacgtagtggccagacagaacagcggtgctgaggcagctcaccacctgggagccagggtcacaggtcagaggaaccccatgacctgccagccatcatgtcccaataacccaggcctgaagaaagaggcttccacgcagtctgtggggctccccaaacacctgacctttatgcttttacctttatcctggggccctgagcagccttgaaacaacccttccatagatggaaccaggcttggcccagggaggggctgtctcaccccctaatacccccttaacctcccattcctgggcttgcttgctttttttttttttttttttttttttcgagacagactctcactctgccaccaggctggagtgcagtggtgtgatcttggctcactgcaacctctgcctcctgggttcaagcaattctcctgcctcagcttccagagtagctgggactaccggtgcgcgccaccacacccaggtaatttttgtatttttagtagagacggggtttcactgttagtcaggatggtctcgatctcctgacctcgtgatccacccgcctcggcctcccagtgtgctgggattataggcataagccaccgtgcctggcctagggctttcatgccccatacccacaccctataccaggacacccccttctcagaaaagctccatattccacatttctgtgatcagctggacacctgtgggggcacccaaactccttaggctcacatggtgggtgccctggcatggtgggtgcccttgtatggtgagtgccctggcatggtaggtgccctggcctggtgggtatctggactccccagctgtggccagcagccacctcctccccctaactcagcctaagactgggagccaagcaccagctgggggcagagactgtgggaaattataggacagcaaaatgaagagagggccgggggcggtggctcatgcttgtaatcccagcactttggaaggctgaagtgggcggatcacctgaggtcagaagttcgagaccagcctggccaacatggagaaaccccgtctttactaaaaatacaaaaaattacttgggcgtggtggcgggtgcctgtaatcccagctacgtgggaggctgaggcaggagaattgcttgaacccaggaggcgaaggttgcagtgaacagaggccgaaccactggaccccagcctgggtgacagagtgagactccgtctcaaaaaaaaaaaaaaaaaaaaaaaaaaagaatgaggagagactgggaacctcgggctggacagggctcccctcctcccttcctgtctggcttctgccctcagagtctcaccaccaaatgatgacagagaagatcccaggtcttgcccaaggtctggttccacagcaggtcagctccgtctgccaggaagtaacctgtgggcatgggggtaggggttaggctgctccagagcccgggcagcttagagaggatttccagcccccccgccccgcccctctcccagttcttagttttcccttggtaaagccttcaggaacgtttaacccccatgggggcggggaatggacctggaaggacagcagaacctgccccccgccccatccccaccaccggcccagccttccctgcagactcacccacagacacagccaccagcaccagagcccagcgcgggtggccatggatggggtcggcggccatctgagggtacagtgacaggctgggggcatggggtggggacatgggggggggcatggtcagcctctcgaggccccggccgcagtctccctgtgcgcacccccaccccagtctcagctctggagacgcccggcgggtctcccggcctcagcctcccacccctcgccctcgccccgtgcgcctcgagcccccaagcccgcacccgagcagcgccccggtccccgagagcaggctgtgcgccagggagacgcagaggttccaccactgccagcggtcccgagcggccgattccggcgtgggcagccgccgcaacccccagtgcagcccccggaacgcgaggaaggaggcgccggccaccaggagccccgtgggcgccatggcctggcggttggggggttgcggggagtccgggtcggtcccctcggcgcccgcgctctcggccgggactgggaacccgtttcccggcagggctggggccccggctcccctccccgccgcgcctttgggatcagcaggaacttttccccgttcgtccacgcccagtccctcgcctgggcggtgattggagcagccgcggggccgccgcccccggagccttggccaccgattgcgtcttgctccagccgggggagcggttcgggggctccgggcagtagaccatgccctggagctcggggggcctccgggatgttcgccaataggggtcctccccagctccaagcgtcctgaagcgctggagttgcagacctgggtctccagtctaacctcaactgacactcccgggccccacccacgaaccttgacctcttcccggctcccgcgactttcacctgctgagcgtcatcaccacccaccgccacaccctgcaaggcagaggctagcgcagcccactcgtacctgcccgagcctggccgccgcccccacttccctccccgcgtccgtggtggggacggggtgccccactttcttggagccaccccttcggcctcctgaggtttccacgcctttaccatatcccggcaaacctgtaattccagcagttctgctccccctcccccacaacccccaggagaccccatgttggagaagcgacccactgggccccgccccgacccccagcattgttttcggccctacggaggagcctcattaggaagaggacgcaaaagggaatcgctggcccccagtcttgaaaagcacttccttccccaagggcttggtacccgttgggtgggtagaatatcttcaatccgagggcaaggaaaggtaacacagggtcccttcaaggctgggacagagtcagaagagaaaaacagacctgtcctgctcttagtagcagggcggttaggattccagaaccctccagccttaagaggaagagcctcccccagcccctcaccacctgaagagccccaggttgcactgctttccttccaccttactccactccacctcttcagctggcagacagtcagcaagtcagagctgtttcctgcaggctgagagggaggattccagctacttcaaagaattaagttcataaaccaagaggtgccccaaccaaaccttctcaccaaaaagctgaggtcttcccttcattcttctacccccacctctccaaaggtttaaataataacactgatctcttaaattatattatatgaaatacaaaatgtggaaaatttggaaattacagaaaaaccaaagatgaaaattacagtgactttgttccaccatacaaagataaccactcaacattttttagtatgccttccgtcttttttatctgctctacgtatacaagcatacacccatattttaaaaaacaaaattgaaatcacataacatgcactatttttacaaccttttaatattcaaggagcatttttctttcagtcagatgttcttttacatgacttttaatgtctgcgcggtactccaccatctggatggagatacaataatttacttaagcaatcccctattgcaaactttcgttacagcagaaaaggaataaattcccaaccaaaccattgcttcccatttttctccattgcaatgctgggatgaacatcttatcactaactaaatccttaagtattttcttaggataaattcccaaagatagaattcgtaggtcaaatgacatggaggcttttaggccacatgacacatatcacccaactgtcatccaggaagcctgcaccgatgtatactcccacacgcaatgtatgggaatgttttttcagtagtctctttgccaatattgggtcttatttttttctgttatggtttgctaagggaaaaatgcttccagctctatttgcctttctttaattactaatgaagcatactttttttcatggttttatccattcagatttcttttatgaatttcctgtgtgtgtcctttcgcagatggttcttggtccttgaggctgcttatataaacattacaggctgggcggaggtggaagtagggcggtgaagccacagggcaccgcactatggtgccacatctcggaggcagaaagcctggagagaaatggtgatcaaagtaggagagggctggaggctcgccgtcaatggaggctggctgccctccctcctcttggggtgctcctggcctttaggggctcctctgctggatgcccaggtaggaccctgtgctctccaggcctggtccttcactggtctccatattcccaggctgcctctcctcacctctgctccatgatgggtgaagatggcagaggcacatagcgagggctggagggagatgctgtggccagtgaagcaaggagaaagtacggaggcagtgtccagggacagagtcacctttgttgcagcctatgagtctatcccctgcttctctaccactgtcccacacgcatcctgcccctcagcttggctgcagaagagcagggttccacggtctactcttctccacatccttgagtttttcacaagcggaggacaagatacagctccctgcacatctcctcccaccaaatcgaacagacacagcttcctgtagccgctaggtgagaatggatcagggctggaggtggcaggtttacactcactgcctgatatctggaaggaggtcacatcccacaacccacctcccctacttgctgcaggggagaatttcctgtctgcacaggcctgagctggggatcacataccaccttggaaagcaaagtgaggaaagaaacagagtagcagcagttagaatcccaccaaggggctgctgtcctgctttggatatcaggggaagccttgggccacccttgcatggggggaagtcacggagaggcgagctcttactagctcctcgcattggtctaactctaaccccctcctccagcttcccattccccacccagcttctgggtgatggtatcagggatgggggagggacaacagcttctgtgaaaaggtgttttgtttccacccacagcagggggagagcccgggttctgagtcaacccagatgggcttctgattccctcatgcacactcatctgtgtgactgcccatctcacaggtggagaaactgagacaggaggtctaagggtctcagatacaggtaagtgcccaggaatctagagtctgggccagcctaaggaaatgcagggaaaagtaagagcagaaggatgactcctcacgcctgggtttagtatcacttttccctgaagagtgagcttacttttggacctcatctggaaaggccagtggggaagaatgaaagatacggaaggagggtcaagaaggaagtcggggagacagagtgttctctccacttcttcccactgtcacacaaagaccaactaaccttgggttgtttgagccttctactcctcaatccagccagtgtctctaatctaaaaccgctccttgctgggccaatctgggcaaaggctctccaacttgcccaaaacgtatcatccaccctgctgttcggaccttcccagcccatttctgtcaccttccagatgatggggaaagcagctcctcctcctcctcgaagccaggggcagagggcaacagttcttcaactggcagctttagctgggtcaggacataaagcttgccactgaagaactactgcggctcagccaggtgagggcgtgagaggaacaggctcctaagggaaagggagggaaaatgggaaagatctgagcagggcatgttgctgcaacgctgacccactcgctggccatcagggtcctgccccagtagacctctgagattctaatgcagggctgcagctctgatctgggcccgcggaagctgttaacctcgctgagcagcaagaggtggctgtaaacagacttcccttgctcttctttccagaactggagtctagagaaacccagtcctgctctcaccctcccctgccctagcggcccctgggggcccagcctcctcagcattcagacagggtggggcccgggaccctggacacaccccaccagcacgcaggtactagaagtgtggtacctcaggtccagaaatgtgagttcagtgatcagcccaactgacttgttcccagggagttcagctggaaggagagttctgggggcctggattggggaagagtgaggaagggaggaggcctagcgtttgaaagaaggtcagcagaggcccccggggctgtgaggggcggacaggggaccacaggctggagaggagggaggtatcggcagggtggccggggctgtgaggggcgggcaggggaccacaggctggaggggagggaggtatgggcagggtggctgggcagcttccccaggactctcagatgccaggcattccgcttgcgcattccgggtacatctggtatgaattccaggctgtctgccggcccctccatgtctgaactttgttccaagttccaagccccgcccccacagttccaacgcatgaatcagcaggaaaagccgggccctgcagcatggcccagggagggggctgggggcgtggcaggctcgggggatgtgagctggggagggcgggtccgtgctgacactcagtccaagggcatggcccacgccaggctgaggggccaaggcggtcttgccttggaatttctatactcagagggtaagaaagattgggggatacggggtgcggttcaaattccgaaaccctcttgggaggcatgaactttgtgtatcttccttcccctgggtgaccagtccaactccgtccgaccttcctctgtctgagatagctctgttcaacccagaggactcagcagctgctgagagtctgtgccaagcaggtgcccttggctgcagggcggggtgggcccagggcactgaccctctgaccagctgctccatcaaccctctggcactctgacagctcctagcccaatctgacagccaggatgacaggccaaaggagttggaggctggaaccagggccggagggaggtgggggtgacagcctcgccggaggccatggggaggggccaagagttggccgagaggtggggagagaggcagcccagtgatgactaacccaggcgccccacccagccagccggcttcccaggcagtcagggccaggcctgggctaggggcctcacaatcggacaggctggggggaggtgcagaggtgaccttctctcggcccaagacggccagttagtctggggagcgggggttagagtttccaggccctcctcttgccctcttccccccgcccaaccacggtgaaaccctaacctttgggttgcataaggccccggcaccgccgccccctactcctctcccctccccccttacataacatcccctggagagaacgagaggaggggccggcccgcccagcgaccccttccctgccagggcgctgaactggccctgacccagtgaacgccggcagaggcaaagcacctcctcgccgcccgctcggggggtccagaccctccccaggctagatggccggcccctgtatcctcagaccgggggccgccgggtgagccgcccccggccctccggcccctcggctctccccccgccccccgccactccgccagcccttccgccacgactcccgtcccagactctttcctcgtagctcctgacacactaacccggccagtccaggcccctctccccgaggcgcccctgcccccgccgccccttctcctcccggaagggctgggtgtggccgcccggaccccactttcaccctccatcccgttaccgcggctccccgctgcgtgaccgggtcgccagctcacacccacctggtgctgggtgtgggggttgctgcacgagggggagcaaatcactgcgtccgctccccacggccggcggcgctgtctcttctcggcacccagcacacaccggctccaggctccgatcagctggcggcgtcgtgacgcacgagctgcgaatgcacggcccggggccaatcaccgcccactgctgggcaacgtggccccgcccacccgggggccgacggggcctcgccctggtcccgcctctccgggcgccctggctctgattggcaaggaggccacccttttgccgggcggaattgcacgaagccacgcccacccactgaggagccggccaatagacggacaggtgtggcccagccctccgcgtcagcgacccgcttagaaaagcgctacgtcaaacgagagtcctaaagagcaggcgaaagccacggcgtctgcgtttgcaatgcatgctggtccgtgtagttctcagcctgacaccgtcgttcccagaacccagcgcgctctgtgagttggcatttttaaactgagctcggaatccagcccggggaagtccttaaagggcgacagcccctccttgttggagtcgtgagtgcttcttttagacattccccaaactgactcgccggcctctgcgggacgctatagctctttaaggaaaggtggagcggaccaaggagcaggagtgggcagagcgtcagcccccagggcagcagagactgccgttggagagctctccagggtttttggaggagggagggtgctcgcctcgcccagcccactcctcctgggggctcttcctaaccacaggaggctttttttcttggatgtctcttcccagtcccagaagagcccccagagcctcccaagaggtagctttctaacaaaagattcatagcacagtcctcaccttagggtagagggagggcttctggtcagaaattaggggatgggccatgccaaagtgcaaagggtcagcaatcgcatcctctgattaacccccattcagtcccgccctccaaagctcttcactgactcaggcctacttagggaagagattcgaaggtggagaccaatgagcaggctgctccttccccaggggccaatcagagtctagatgagcgggggatgggcaaaaagtgaaatgaacccagtgacttggcaaaagctgctggtcggcgtttttaaaggggcaagccggagacctgccctaccttatcaatccccgcaagtcccccaaagaggaacatgtggactgaaatccatgccttttccttcagctccaaataggggctgagggtaactaagcaggaatgatgaggctggagggtgagatccttccttctgttaaatacgcactccatcaggtaattgataaggttcacttggagctccaaaattctgagcctgcgttcaggacattgcgcctttaaggaaacttcctgccttgcgccccagtaacagctgattgttggaaagtgtgacctctggggacgaatcagctgttaccacatcctcctccttgcttaccctcctccatccccttatccactcccatgggtggtgaaggaaagaacgtgggggatgtgattgtatgatctttcttttcccccatcactccaagactgtctcccccaaccccaaccccgctctgctccttagttcttcagaggctctgggcttggaaagagaggtatttcctgttagcacagtaaattcagactctgtggtctagaccctccctggtctaggggaaggccagtactggggaggtccagaatggtggctggcgctggggagggtacagtgaacccgaggaccaagcctggggaggaggaatggctatgggaagcaaacttggggttcagaacgctgcttctcaggccagccgccccctacttcctactcaagttgccctattcctccatggacaggtgtctgctgatgggatcctcctgcttttgcccatttactccacctccttatttattttttttttttctgtttttgagacagagtctcgctctgttgcccaggctggagtgcagtggcgcgatctcggctcactgcaacctccacctcccgggttcaagcgattctcctccttcagcctcctgagtagctgggattacaggcgtgcgctaccactcccagctaatttttgtatttttagtagagatggtgttttgccatgtgggccaggctggtctcgaactcctcacctcaggtgatccacccgcctcggtctcccaaagtgctaggattataggcgtgtgagccaccgcgcccggccgcattcactccacttctaactgttctcagctgccacctggtccctgggccgctccatttttggcttttggcggtgccctgcccacatggccaccccccatagcaagggtcctaattgctcaaggactgcaggtgggacacgttggccccagaagccagcgtctttggctgggaagtgctgggaagacccaggtaaatattttgcctcgatcctgagttgggagtcagggtcactccaggacaagcttagtgtgaagtcctaggactgacttggcaaggcgtggagaaattgagcagggccctggccaagcatggaaggaagtgaagcctcaccagtggcccctattctccattatcctgagcatagaaatcccatccctttcccactcacggcccttggggtgacccttttccattttgttctgaacactgaccccaccccctaggtcaaaagcacaggcttcgagtccagggtttcgccacctcagcacccactggcattttaagtagaataatttcttgtgggagggctaccgggtgcacaataggacatccacgtggtccctggcctctgtcctagatgtcagtggcaacacccacccacccccagctcccagttttgacaaccaaaagtatctccagacgttaccaaatgtctcctaggggccaaaatctcctccaactgagaactactgtgttaggcacacttagattcaaattccagctcttactagctgtgaacttgttaccgataatttcccctcatctacaacatacggtgaataaggaattcaagccttgttgtagggatttcaacatttaaaaatattttaaaagttaaaaatgtgcccgggcgcggtggctcatgcctgtaatcccagcactttgggaggctgaggcaggcggatcacgaggtcaggagatggagaacatcctggctaacactgtgaaaccccgtctctaataaacatacaaacaattagccgggcgtggtggcgggcgcctgtagtgcccagctacttgggaggctgaggcaggagagtggcgtgaacccaggaggcggagctttgcagtgagccaagattgggccactgcactccagcctgggtgacagagcaagactccgtctcaaaaaaagaaaaaaaaaaaaaaattaaaaatgtggccaggcacagtggctcatacctgtaatcccagcactttgggaggccgaagcaggtggatcactttgagcccaagagttcaagaccagcctgggcaacgtggcaagaccctctttaaaaaaaaaaaaaattaaaaaatggcctggcgaggtggctcacacctgtaattgtagcactttgggaggctgaggcaggcagattgcttgagctcaggagttcgagaccagcctgggcaacatgatgaaactctagctctacccaaaatacaaaacattagccaggtgtggtggtatctgtggtcccagctactcaggaggccgaggcagaggttgcagtgagccaagatggcgccactgcactccagcctaggtgacagaatgtgactccatctcagaaaaaaacgaaaaacaaatttaattagaaaacacctagcatagatttaattagaaaacacctagcgtagatttaattagaaaacacctagcgtagatttaattagaaaacacctagcatagtacctgccacactggtccgcagctggtgcactacttttctccctgccggattagcaagagctgaccccgctcaacatgggctgactggtggggcagctgcagcctctgtccctgactatccaagacatgacctcccggaaacccaatactgaggctggccaaggggagcggctaatttggtctgagattccccagagcccaaaggtgcttgcattgggattcagggaacacgcttactgggggcagtgagagggaaattccggaagagagctgttacagacgttacttctcaagacatagcctgaaggttgctgcatcagaattacctcgcgtacttgttaaacatttagatagctgtatctcactccagactcctgaattagaattatgccctaaagggccgggcatggtggctcacgcctgtaattccagcactttgggaggcggaggcgggcggatcatctgaggtcaggaatttgagaccagcctggccaacatggtgaaaccccatctctactaaaaatacaaaagttagccaggcgcctgtaatcccaggtactcgggaggctgaggcaggagaattgcttgaacctgggcggtgaaggttgcagtgagccgagatcgtgccacagcactccagcctgggcgacagagtcagactccgtatcaagaaaaaaaaaaaaaaaagaattatgccctaaaatttgaaaactactgccctagggctcagattgggccagggtttgaggccccaggaatcccagtgcgccagttcccaatattgctaggacatctctattctcgggaggaaaggagaatttcaagaggtaaaattaggtacactcaaggtcactgctgcagtgtaaccccagtaccgctagagggcagggcacacacagacttgcagacagaaaaagtagtacctgctcaatctaggtaaactgagaccagcgcaaagaacaggtggacccagccagctctattggtactaagaagcaagcactaccttctaaccatcaaaacatatcctctgatttcaggtatttatatcaaagttggggctgggcactgtggctcacgactgtaatcccagctctactaaaaatataaaatttagctaggcgtggtagcaggcacctataatcccagctactcgggatgctgaggcaggagaatcacttgaacccgggaggcggaggttgtggtgagtcaagatggtgccattgcactccagcctgggcaacaagagcgaaactttgtctcgaaaaaaaaaattagctgggcttggtgacgctgcctgtagtctcaactactcgggaggctgaggtgggaggatcacctgagcctggggaggtcgaggctgcagtcagctgtgacaaatcactgcactgcagcctgggtgacagagtgagaccctgtgtcaaaaaaaataaataaaaaatcactcgggcaccatggctcacacctgtaatcccagcattttgagaggccgagatgggccgattgcttgagcccaggagttcaagaccagcctgggaaacatggcaaaacctggttactacaaaaatacaaaaaattagctggatgtggtggcacattcctgtagtcccagctactcaggaggctgaggtgggaagttcacctgagcctggaaggtcgaggctgcagggagccaagatcacactactgcattctagcctgggcaacagagtgagactctgtcttaaaaaaaaaaaaaaaaatcaggccgggcacggtggctcacacctgtaatcccagcactttggaaggccaaggcaggcagatcacctgaggtcgggagtttgagaccagcctgaccaacatggagaaaccctgtctctactaaaatacaaaaattagccgggcatggtggcacatgactgtaatcccagctactagggaggctgaggcaggagaatcgcttgaacccgggaggcggagattgcggtgagctgagatcgcgccattgcactccagcctgggcaacaagagcgaaactctgtcttaaaaaaaaaaatcttcttaaaaggggtggtgaggattacacaaaacagggtatgcaaaatgcttaacagatgactagctcctggtaatgctccatacaagtttgttgtaagttactactgcccaggatcatatgaccaagcacatgagaggctccagctacccttcaaggaagaggagacagatgaaatcagatcatggctgagacattcctgttttctctctctttttttttttttttttgagatggagtctcactctgttgcccaggctggagtgcagtggcgctatcttggctcactgcaacctctgcctcctgggttcaagcgattctcctgcctcagcctcccaagtagctggaattagaggcgtccgccaccacacctggctaatttttgtattttagtagagatggggtttctccatgttggtcaggctggtcttgaactcctgacctcaggtgatctgcccatctcagcctcccaaagtgctgggttacaggcatgagccaccgcacccggccctcctattttctctcctatcaggcctagttttcttttcttttctttctttctttttttttttttttgagacggagtctcactctgccacccaggctggagtgcagtggtgtgatctcagctcactgcaacctccgcctcccaggttcaagcgattctcctgcctcagcctcctgagtagctgggattacaggcacccgctgccacacccggctaatttttttgtgtttttagtagagatggagtttccccaagttggccgggctggtcttgaactcctgacctcatgatccgcccaccttggcctcccaaagtgctgggattacaggtgtgaaccaccgtgaccggccaaggcctagttttcctaagtgtctttatgggaccctcacacctgtacaccaaactccttcaagaggcaaactctctcctaagagggagacaaaagaaacagggccagtggtttcactgtagacaatggtctatctgtcctgcagatgagtcagaactaagaccccttgaggaatcatgttgctttggtgccggctgtctggtttctattccatatcctgtgccgcacccttcccccagccacagtgacatctggaggctctgaccacagctggcaggctctgtggtaccgcagaggccaatcttcaacaggaagtcttgggggaacatttcttcccccaaaacaccaggcctctgggcctgggccacttctctccctcagacagcccagggtttcgttttatttttattttattttatttatttatttttatttatttatttggttttatttttatttatttatttttatttatttatttatttatttatttatttatttatttattctttttgacggagtctcgctctgttgcccaggttggagtacagtggcgccatctcggctcactgcaagctctgcctcctgggttcatgccattctcctgcctcagcttcccaagtagctgggactacaggcgccccccaccacggccaggtaattttttgtgtttttagtagagacggggtttcaccgtgttagccaggatggtctcgatctcctgacctcgtgatccagctgcctcagcctcccaaagtgctgggattacaggcgtgagccactgcacccggccagttttgttttttaaaaagccgtgagagggctgtcaggaggcagtgctcctgggcagaaagaaggctggcaccagtttctaagtctccattccgccaggcggacaagcctctctggcggttgttggttatcacttgtaaaatataaacagtaataactgtcctccctacctcacagagtgtgttgcgagggccaaatggaatgtgactgttgaagtacttaggaaagttaaaaagctccttcctatggaaggtggcatggaggcgccggggggattccatgtcaaaagtcccagttctggccgggcgcggtggctcacgcctgtcatcccagcaccttgggaggccgagacgggtggatcacgaggccaggagttcgagatcagcctggccaacaaggcgaaaccccatctctactaaaaaatacaaaaattagccgggcgtggtggcgcgctcctgacgtcccagctactcgggaggccgaggcaagagaatcgcttgaacccgggaggcagaggttgcggtgagccgagatcgcgccactgcactccagcctgggcgacagagcaagactccgtctcaaaaatagacacaacagaagtcccagttctgcccctggttgtgcggtccgcacttaactaagaggctggcatctctgggaacagcctccgggacccgcgcgctggtgcgtgctggagggagtagggaggggtggggcggtaggcatcgccctccgccgggcccggctggagctggctggagaccctttcagccccgggaggaagcggagcccagaccgagccagagcggagcagcgggagggagggcggggaggccgccgggcaggaagcggggtcccgcccgggcctctggagccacgtgcgcttgtttccgtgctggggcgatcacgtgacccgcgtcagctgacccgtcacggtggagcccggtgctcgcgcccggcagcctctgccccgccgcgcccggagcgcaggacccgcggaggggtaagcgcgccccccgtccgcctcttcgccgccgccggcttcctgcggccgcctccgccccagcccctgtcccgcgcccatcccagccccgccggcctggcaccccggaagccgtcgccagcagggccgtggctgggctcagccccgcgctgcccccgggcggcctggaggagatggcccagggcagcggggggcgggaaggcgctctcagaaccccggccgggggctggcattccccgccaagcccagacatgcaggagctgctccggagcgtggagagggacctgagcatcgatcccaggcagctggctccggccccggggggcacccacgtggtggccctagtgcctgcgcgctggctggccagcctccgcgatcgccggctgcccctgggaccctgtccccgcgcagagggcctgggagaagcggaagtcaggactctcctgcagcgctctgtgcaaaggctgcctgccggctggacgcgcgtggaggtgcatgggctgcggaagcggagactgtcctaccctctgggcgggggcctgccctttgaggacgggtcctgcggccctgagaccctcactcgcttcatgcaggaggttgccgcccagaattatcgcaacctgtggcgccatgcataccacacttacggccagccgtacagtcacagccctgccccctcagctgtccctgccttggactcagtacggcaggctctgcagagggtctatggttgctccttcctgccagtgggtgaaactacccaatgcccttcatatgccagagaaggcccctgcccccctcggggcagccctgcttgccctagtcttttacgggctgaggccttgctggagtcgccggagatgctgtatgtggtacacccttacgtacagttctccctacatgacgtggtcaccttcagccctgccaagctgaccaacagccaggccaaggtgctgttcattctcttccgcgtgctgagggctatggacgcctgtcaccgccaggggctggcgtgtggggccctgtctttgtatcacatcgcagtggatgagaagctttgcagcgagctgcgactggacctgagtgcttatgagaggcccgaggaggacgagaatgaggaggcccctgtggcaagggatgaggcgggcattgtgtctcaagaggagcagggagggcaacctgggcaacccactggccaggaggaacttcggagcctcgtgctagattgggtccacggccgcatcagcaacttccactacctcatgcagctgaatcggttggcaggtcggcggcagggggaccccaactaccaccccgtgctgccctgggtggtggacttcactacgccccatgggcgcttccgagacctgcgcaagtccaagttccgcctcaacaagggggataagcaactggacttcacgtatgagatgacacggcaggcattcgtagcaggcggggcgggcggcggggaaccccctcatgttccccaccacatctcagacgtgctctccgacatcacgtactatgtgtacaaggctcggcgcacgcctcggtcggtgctctgcggacacgtccgcgcgcagtgggagccccatgagtatccggccagcatggagcggatgcagaactggaccccggatgagtgcattccggagttctacaccgatccctctatcttccgctccatccaccccgacatgcctgacctggatgtgccagcctggtgcagctccagccaggagttcgtagctgcccaccgagccctgctggagagccgcgaggtatcccgggacctgcaccattggatcgacctcacgtttggctataaactccagggtaaggaggctgtcaaggaaaagaatgtgtgtctgcacctggtggacgcccacactcacctggccagctacggggtggtgcagctcttcgatcagccacacccccagcgcctggctggggctcctgcccttgcccccgagcctcccctcatccccaagctgttggtccagaccatccaggagaccacaggccgggaggacttcacggaaaacccgggacagcttccaaatggagtgggccggccagttttagaggccactccctgtgaggctagctggaccagagacaggccggtggcaggagaagacgacttggaacaggccacagaagctctggattccatttcccttgctgggaaagcaggtgaccagctgggctcctccagtcaagcgtcccctggacttctctctttctcagtggcctcagcctcccgtccaggccgcaggaataaagctgctggggcagaccctggggagggtgaggaggggaggattcttcttcccgagggcttcaatcccatgcaggccctggaggagctggagaaaacgggcaacttcttggccaaaggcctagggggcctgttggaggtgcctgagcagccccgggtccagccggctgtgccactgcagtgcctactccacagggacatgcaggcgctgggtgtcctattggcagagatggtgtttgccaccagggtgcggacgctgcagcccgatgcacctttgtgggtacgcttccaggctgtccgagggctctgcacgcgccaccccaaggaggtccctgtgtctttgcagcccgtgctggacacactcctgcagatgagtggccccgaagtccccatgggagcagagaggggcaagctggaccaactgtttgagtacaggcctgtctcccagggcctgcccccaccctgcccaagccagcttctcagccccttcagctccgtggttcccttcccaccctacttcccggcactgcacagattcatcctcctgtaccaggcaaggcgtgtggaggacgaggcccaggggcgcgagctggtgtttgctctgtggcagcagctgggcgcggtgctgaaggacatcacccctgagggcctggagatcctgctgcccttcgtgctctcactcatgtccgaggagcacacagctgtgtacacggcctggtatctgtttgagcctgttgccaaggcactgggccccaaaaatgccaataagtacctcctgaagccgctcattggtgcctacgagagcccctgccagctacacggccgcttctacctgtacacggactgctttgtggcccagctgatggtgcggctgggcctgcaggcatttctcactcacctgctgccccatgtcctgcaggtgctggcgggcgcagaggcctcccaggaggagagcaaggacctggcaggggctgctgaggaggaggagagcgggctgcccggggccgggcctggctcctgtgcttttggggaggagattcccatggatggggagcctcctgcctcctcgggcctggggctcccagactacacgtctggcgtcagcttccacgaccaggctgacctccctgagacagaggacttccaagccgggctctatgtgactgagtctccccagccccaggaggctgaggctgtgagcctgggccggctgagtgacaagagcagcaccagcgagacctccctgggtgaggagcgggctccagacgaggggggtgcccccgtggacaagagcagccttcgatcaggtgacagcagccaggacttgaagcaaagcgagggctccgaggaggaagaggaggaggaggacagctgcgtggtgctagaggaggaggagggggagcaggaggaggtcaccggggcatctgagctcactctgtctgacacggtgctgtccatggagacggttgtggccggcggcagtgggggagatggagaagaagaggaggaggcactgcctgagcagtcagaaggcaaagaacagaagatcctccttggtaagttcccaggtctgggaggtgttggtcaaaaacacctcctgctggccgagcacagtggttcacgcctgtattcccagcactttgggaggctgaggcgggcggatcacaaggtcaggagatcgagaccatcctaataacaaggtgaaaccccgtctctactaaaaatacaaaaaaatagccgggcgtgggggcaggcacctgtagtcccagctactcggaaggctgaggcaggagaatggcgtgaacccgggaggcggagcttgcagtgagccgagatcgcaccactgcactccagcctgggcgacagagcgagactccatctcaaaaaaacaaaacaaaacaaaaaaacagctcctgcttctccctgcacactggcagagcacctactctgtgccaagcagtggatcgagccaggaccaccggcaacacaaatgtaggcctgccttcacagagctcacacccagcagacgagatgccgcagtgcagacagtcttaagcaagtgtattatgttagtgcgataaagaacatggctgcattcctaggagggagtgcaacatggagcttttcggccgggcgccgtggctcacgcctctaatcccagcactttgggaggccgaggcaggaggatcacttgaggttaggagttcgagaccagcctggccaacatggtgaaaccccatctctactaaaaatacaaaaattagccaggcgtggtggcgggcacctgtaatcccagctattcaggaggctgaggcaggagaattacttgaacccaggaggtggaggttgcagtgagctgagatcacaccactgcactgcagcttgggcaacagagcgggactccgtctcaaaaaagaaaaaaaaaatggtgcttttacatctagttttcaagggtcagagcaggcttccttaaaaggagagacagttgaggttcaaggaggagtaggaagaaggtagacaaaaatgggcaaaaagaaagtctgaaggctgagggaacagcatgtgtgaggctctgaggctgtcatgttccattaaagaagagaagcgggggaccgggcgcggtgcttcacgcctgtaatcccagcactttgggaggctgaggcggatggatcacaaggtcaggagattgagaccatcctggccaatatggtgaaaccccatctctactaaaaatacaaaaacttagctgggcatggtggagggtgcctgtaatctcagctatttggaaggctgaggcaggagaatcgcttgaacccggaggttcaaggaggagagtcagggcggtggaaggtggaggttgcaatgaactgagattgtgccattgcactccagcctgggcaacagtgcgagactctgtctcaaaaaaaaaaaaaaagaagaagaagaagaagagaagcagggaaaggccgttatggcgagaccgagggagtggagggaagagaggccagagggaaggtggccagggccgggccaggccttgttaaggagtttcagaagacccacgggcaggctaacttcctgcgggtcgtgcctgtggagaggaacctgcggcagccagagtcccacaggccagggcctgggcacctctgccgctgttacgtggagggggtggtgtgggacagccggcccgggctgggctcttggcagagctgcagccgcaggtggttgagtggggtgccgtggggtggggtgggaggggtgatgagcccctgttatctgaggagctcagggcctgctcccaccccgcagatacagcctgcaagatggtccgctggctgtctgccaagctcggccccacagtggcctctcgccacgtggcccggaacctgctccgcctgctgacgtcttgttatgttggtaaggaggcctgcggtcagtgctggagatgaggctttctcccaggccctctgcctagcttcagcgctctccggcggggatccttcccacccctccctcaaaccaccccccggccaggtgctgggtcccagtctaagtgccagccttgggtagggccaggctgggcccccagctagagtgagctcaagcggccagcacagccctgcagggccaggctacccccggccctccactggcgactcagggctgctggcccttccgtggcaggacccactcggcagcagttcacagtgagcagtggcgagagcccaccgctgagcgccggcaacatctaccagaagaggccggtcctgggcgacatcgtgtcagggcctgtgctcagctgcctcctccacatcgcccgcctgtatggggagcctgtcctcacctaccagtacctgccctacatcagctacctggtcagtcgctggtttggcaggcccggggctgggaaggctgaggacctgagggccggcccgggctctcttggtgccagggggtctgtggggctgcccggccctcatctgctcggtggctctaggtggccccagggagtgcctcaggccccagccgactgaacagccgtaaggaggcggggctgctggccgcggtgacgctgactcagaagatcatcgtgtacctctcagacaccacactcatggacatcctgccccggatcagccatgaggtcctgctgcccgtgctcagcttcctcacctccctcgtcacggggtaggcctctgccccagctgatgtagggggaccggcccagcggaggggctgcccaggagggggtgggaagctcaggggagaggacgtaacactggactgggtgtcaagagtcctggttttgatcccggctgtgtgaccctgagcaaaccacacccttttcctgtgcctcagtttcctcatctggtttggaccagttggtcttggagctctttcatttaaagcttttgatatgtccgggcacggtggctcatgcctgtaatcccagcactttgagaggctgaggcgggaagattgcttgagcccaggagttcaagaccagcctgggcaacaaaatgagaccccctctctaaaaatatatataaaggccgagcgtggtgtctcacccctgtaatcccagcactttggggggccaaggcgggtggatcacgaggtcaggagtttgagacccacctggccaacatggtgaaaccccgtctccactaaaaatacaaaatcttcgctgggcatggcagcaggtgcctgcaatcccaggttctcgggaggctgcaatcccaggttctcaggaggctgaggcgggagaattgcttgaacccaggaagcggaggttgcagtgagctgagatcacgccattgtactgcagcctaggcgacagagcaagactctgtctcaaaaaaaaaaaaaagtatatatatatgctgggtgctgtggctcatgcctgtaatcccagcactttgggaggccaaggtgggtggatcgcttgaggtcaggagttcgagaccagcctggccaatatggcaaaaccctgtctctactaaaaatacaaaaaaaattagccgggtatggtggctcatgcctgtagtcccagctactcgggagactgaggcaggagaatcgcttgaacccgggaggcagaggttgcagtgagccgagatcgcaccactgcactccagcctggatgacagagcaagactccatctcaataaaaataaaaataaataaagattttgctagattctggtcaagtcctgcagaacggcgggctggagctcatgagctctgtttccaggttcccaagtggggcccaggctcggaccatcctgtgtgtgaaaaccatcagcctcatcgccctcatctgcctgcgcattggacaggagatggtccagcagcacctgagcgagcccgtggccacctttttccaggtcttctctcagctgcatgagcttcggcaacaggtgggcagatctgctgggccagggcgggctggggcgggggctgtggacctgggtgaccccctgggcatcttgctcataggatctgaagctggactccgcgggccgtggcgaggaccagggtgggccagggtgggagctgtggacccggctgaccccctgggtgtcttgctcataggatctgaagctggaccctgcgggccgtggtgagggccagctgccacaggtggtcttctctgatgggcagcagcggcccgtggaccccgccctgctggacgagctgcagaaggtgttcaccctggagatggcatacacaatctacgtgcccttctcctgcctgttgggtactgccccatcacgttccccatcacagtcttcgtggctgtctcctcccttgggaggccccattctctgcccttgccccagagtcagcagtgggttctaagagccagcaggatgggtgagagcaaagggatttggcctcagacccctacccccaaggtgacacacaaacaaggactgagcagtagccagcaagagaggcccagaagctggcctgtagtgtccctggggaaggcaggagagtcagggaggtggactggcggtccgcaggagctggcgagagggaaggagtggcctcctgtttacgaagcttcccctctgggccctgcacggtgctgtgctgatcgtttcagcgtgtcatctccctggagaggacagacagccttgtggttacacctgttatcatcctgccactgaaatctaagcttgggaggccagggcaccacctgtcttgttccatattctattcctagtgcccagcacggcacggcacatatagaagatgctcatgtgtacatcacaacggaatgaatccacatttcactgaggaggaaactgaggctcagagacagagttacttgcccagagttgcagagccagttcctgccccatcttctgtggctcccgagtccttggatgggtgatagcagccgcctgccatcttccctgtctcaggacctctcccactcctatccaggtgacatcatccggaaaatcatccccaaccacgagctggttggggagctggcggcgctgtacttggagagcatcagccccagcagtcgcaaccctgccagcgtggagcccaccatgcccggcaccgggcccgagtgggacccccatggtgggggctgccctcaggatgacggccactcagggacctttgggagcgtcctggtggggaaccgcattcagatccccaatgactctcggcctgagaaccccggaccactgggccccatctcgggggtgggtggcgggggcctgggcagcgggagcgacgacaacgccctgaagcaggagctgccgcggagcgtgcacgggctgagcggaaactggctggcgtactggcagtacgagatcggcgtgagccagcaggatgcccactttcacttccaccagatccgcctgcagagcttcccgggccactcgggggccgtcaagtgcgtggcacccctaagcagcgaggacttcttcctgagcggcagcaaggatcgtaccgtgcgcctctggccgctgtacaactacggcgacgggaccagcgagacggccccacgcctcgtctacacccagcaccgcaagagcgtcttcttcgtgggccagcttgaggccccgcagcacgtggtgagctgtgacggggctgtgcacgtctgggaccccttcacaggtgagcgggcccaggtgaggcctgttctcttcctgctcctgcgccccaccaggcctccaggaagggggcccgagggtggggctgtaatgctgcggagtttggggagacccagcgaggccgcctaggagaacagttagggcttcgaatctgttagacttgagtctgaattggctccaccggcttacttgctgagtgaccttgagcaagttcctgctgctggaagcgtctcctttcccatctataaactgagaatcagaaaaactggcgtagaagataacacacagccgggcgcagtggctcacgcctgtaatcccagcactttgggaggctgaggcgggtggatcacgaggtcaggagatcgagatcatcctggctaacatggtgaaaccccgtctctactaaaaatacaaaaattagccgggcgtggtggcgggtgcctgtactcccaactacacaggaggctgaggcaggagaatctctcaaactcaggtggcagaggttgccgtgagccgagatcgcaccactgcactccagcccgggcaacagagcgagactctgtctcaaaaaaaaaaaaaagaagaagataacacatgtagggttttggcttcatgtgtagcagatatttggtcaatggttgcttattttttggcgtcaccatagggagaaatatggttaaaagggggaaagggatggtgtcggggaagacagagggaggtggcattgggtcagcagcactgtgcagagagaggaggttgctttggggatgggagcctggccgggccatggaagcaggaaggtgggagagtcaagaaacatctttaggccgatgcagtggctcacgcctgtaatctcagcactctgggaggccaggagttggagaccagactggctgacatggtgaaaccccatctctactaagaatacaaaaaaaggccggacgcggtggctcacgcctgtaatcccagcactttgggaggccaaagtgggtggatcatgaggtcaggagatcgagaccatccaggctaacatggtaaaaccccgtctctaccaaaaatacaaaaaattagccaggcgtggtggcggacgcctgtagtcccagctattcgggaggctgaggcaagagaattgcttgaacctgggaggtggaggttgcagtgagccgagattgcaccactgcactccagcctgggcgacaaagcgagactccatctcaaaaaaagagaaacatctttagcattttctaaggatccctgggggacgggaggcaggtgtgcggtgagttgggggattagaagctcccagggctcttccgtcagctgctgggaccccagatccactgtgactttccttcccagggaagacccttcgcacagtggagccgctggacagccgggtgcccctgactgcggtggctgtcatgcccgccccccacaccagcatcaccatggccagctctgactctaccctgcgctttgtggactgcaggaagcctggtctgcaggtcaggggggtccagttccctgagcactcgcctggttctctggggacctggcaaggaggagagactccccaaaaacagaaagccaggatgttgttctggggccctagttagtttctctttggtgctagatcacccacagccacacatcctgcggggcaggactctggcctgtgatgggggtggggttctgggcttttcatgccccctgatgagggtcagaggctcaggccttcctgctgtgtgggcttgggtggtgggcagggccttggggagtgtgagatgggaaggtggtgcctcagctcagccgccctctccctgcagcacgagttccgactgggcggtgggctgaaccctgggcttgtccgtgccctggccatcagccccagtggccgtagtgtcgtggccggcttctcctcaggcttcatggtgctcctggacacccgcacaggcctggttctgcgaggctggccagcccacgagggggacattctgcagatcaaggtgacgggccgggtctccctccccttgctgcccaacccccgcccctgtccagccatcacccctgcttagggtctgcctgcccgggttcaggctcgaactggtctgtcttatatacctggtccaggactaactgggcagggagggtagccctctcggtccaccttgggagccagttgcactgcaggggtctcagcaggaggcaggccatgggggcgggagccacggggcagtggggcgggagctatggggcagggctgaccctgttgctcatggcgatgttctaatgagtaacccttgtccatatttgtcttgcttggaggatcaggggtcaggccctgtccgtgacctagttcaggttaaataaagctgagctgggaggctgtttactgcctgtagaccgctgagcagagtccatggccctgccgggctgccctggctgggggcaggagcacgcctgggcatggggatcctgtccccgtctccttcccctccccctccctccattctcagtcacaggcctcggggagctgctcagggaggcccaggaggggaggaacagggcttcgtgtgggaggatttctgcaggcagctgggactttcctccccagcttggctggaggccaggagtcttgcattgccctgctgacagcaggctgtcgctggctccctccagagccccagggaaccctcagctcaaggtgcccccaaattctaactttccaagaaagtgtcaggagggctctggggtcagcctgggtgttaatcccagctctgctgcttgctggccccatgaccttggtatggttacttcacttctctgagcctcacttttcctgtttgtgaaatggggacaatggcagcatccaccgcatagggttgttacgaaggtcaaggtcgtcacgtgcacgcctggcaccatgcctgtgcgtagttctcaagttagagtgacgactgggttacggatgctgagcgtattaaaatgaaccaacgtgaatatggtgtgtgtgggagggtggcggcttgtcacccacccaggacggcctgtctccctggagagaaactgcggagggaactgggaaggccttggggcccaagggtatgcagaaggacccaggctcctgctgaggctctcctctcccgggacaggcggtggagggcagcgtcctggtcagctcctcctctgaccattccttgaccgtctggaaggagctggagcagaagcccacccatcactacaagtcagcatccgaccccatccacacctttgacctgtacggcagcgaggtggtcactggcaccgtgtccaacaagattggcgtctgctccctgcttgagccaccctcgcaggccaccacgaagctcagctctgagaacttccgcggcacgctcaccagcctggccttgctgcccactaaacgccacctcctgctgggctcagacaacggggttatccgcctcctggcatagactgaggcaggagctggccgggcaagggtgggaagacatctgcgggcgcgtgtccactcaccctgttccctgagcagcagctccctccagggaggccctgggtcccacgccctgggtgcccacatggcctgccaactagggcctgcaaatggagtgggggagtcctggcccctgaatcaccagagccaccaagcctgccagaggggtctcattcatggcttggggacacagggctcctagcaagcaggaagttaagagcaggaggaagcgttgctaccttcacttctccccagctctgccctctgggtccacatgaggacagggaagctcgggaaggggaagggagactggccctgcccagccggtctctagcccctcagcccccgctgggcactctctgtcccatccctctaggacagggaagctggcctggtccagggcactgatggtgcttggattccagcctaaggaaggctggccgtggtccaggagttaagggcttgggtctggggtttaagtggccacccatccaggccctggccagtgtgggaccgggacgggaaggaagaaggaggctaggagcagggggaaaaggtgcacttggccagtggcgcctgccaggagtgagtccatgcgttgtctgcccacccctaccacagtgtttgtgccttcagctgagggggcagcctctgggccctgaacccctgctggggctccacgaccctgagagaaggggtgagaagaatcatctctgcacctcgggtctctgccagaggaagacttaagcatccctgcgacctcacattctagacagagatgaggtccaggggttggcccctgctgccttctcacaatttgcaatagatgtaaataggaccaataaatcctttggaagagccatggggtgaactgaggcttgtcttttttttttttttcaatagagatggagtctgactatgttgcccaagctggtctccaactcctgggctcaagcgatcctcctgcctcggcctcccaaagtgttgggattacaggcatgagccaccacgcccagcctgaggcttatcttgctggtggtgtcagggtggggaaagtcgagacccagcagtttccaggacagtgagggtgggaaggggcctgatggagggagtgaggagcaggacagtgagggtaggaggcggcctgatgcagggagtgaggcgcaggacagtgagggtgggaaggagcctgatgcagggagtgaggcgcaggacagtgagggtgggaaggagcctgatgcagggagtgaggcgcaggacagtgagggtgggaaggagcctgatgcagggagtgaggcgcaggacagtgagggtgggaaggagcctgatgcagggagtgaggcgcaggacagtgagggtgggaaggagcctgatgcagggagtgaggcgcaggacagtgagggtgggaaggagcctgatgcagggagtgaggcgcaggacagtgagggtgggaaggagcctgatgcagggagtgaggagccggacagtgagggtgggaggcggcctgatgcagggagtgaggcgcaggacagtgagggtgggaaggagcctgatgcagggagtgaggcgcaggacagtgagggtgggaaggagcctgatgcagggagtgaggagcaggacagtgagggtgggaaggagcctgatgcagggagtgaggagccggacagtgagggtgggaaggagcctgatgcagggagtgaggagcaggacagtgagggtgggaagtggcctgatgcagggagtgaggagcaggtgtgagggcgggaagcggcctgatgcagggagtgaggcgcaggacagtgagggtgggaaggagcctgatgcagggagtgaggcgcaggacagtgagggtgggaaggagcctgatgcagggagtgaggcgcaggacagtgagggtgggaaggagcctgatgcagggagtgaggagcaggacagtgagggtgggaagtggcctgatgcagggagtgaggcgcaggacagtgagggtgggaggcggcctgatgcagggagtgaggcgcaggacagtgagggtgggaaggagcctgatgcagggagtgaggcgcaggacagtgagggtgggaaggggcctgatgcagggagtgaggcgcaggacagtgagggtgggaaggagcctgatgcagggagtgaggagccggacagtgagggtgggaaggagcctgatgcagggagtgaggagcaggacagtgagggtgggaggtggcctgatgcagggagtgaggagccggacagtgagggtgggaaggagcctgatgcagggagtgaggcgcaggacagtgagggtgggaggcggcctgatgcagggagtgaggcgcaggacagtgagggtgggaaggagcctgatgcagggagtgaggagcaggacagtgagggtgggaggcggcctgatgcagggagtgaggcgcaggacagtgagggtgggaaggagcctgatgcagggagtgaggcgcaggacagtgagggtgggaaggagcctgatgcagggagtgaggcacaggacagtgagggtgggaagtggcctgatgcagggagtgaggcgcaggacagtgagggtgggaaggagcctgatgcagggagtgaggagccggacagtgagggtgggaaggagcctgatgcagggagtgaggcgcaggacagtgagggtgggaaggggcctgatgcagggagtgaggcgcaggacagtgagggtgggaaggagcctgatgcagggagtgaggagcaggacagtgagggtgggaggcggcctgatgcagggagtgaggagccggacagtgagggtgggaaggagcctgatgcagggagtgaggagccggacagtgagggtgggaaggagcctgatgcagggagtgaggcgcaggacagtgagggtgggaggcggcctgatgcagggagtgaggcgcaggacagtgagggtgggaaggagcctgatgcagggagtgaggagcaggacagtcagggtgggaggcggcctgatgcagggagtgaggcgcaggacagtgagggtgggaaggagcctgatgcagggagtgaggcgcaggacagtgagggtgggaaggagcctgatgcagggagtgaggcgcaggacagtgagggtgggaagtggcctgatgcagggagtgaggcgcaggacagtgagggtgggaagtggcctgatgcagggagtgaggcgcaggacagtgagggtgggaaggggcctgatgcagggagtgaggcgcaggacagtgagggtgggaaggggcctgatgcagggagtgaggagccggacagtgagggtgggaaggagcctgatgcagggagtgaggcgcaggacagtgagggtgggaaggggcctgatgcagggagtgaggcgcaggacagtgagggtgggaaggggcctgatgcagggagtgaggagccggacactgagggtgggaaggagcctgatgcagggagtgaggcgcaggacagtgagggtgggaaggggcctgatgcagggagtgaggcgcaggacagtgagggtgggaaggggcctgatgcagggagtgaggagccggacagtgagggtgggaaggagcctgatgcagggagtgaggcgcaggacagtgaaggtgggaaggggcctgatgcagggagtgaggcgcaagacagtgagggtgggaaggagcctgatgcagggagtgaggcgcaggacagtgagggtgggaaggagcctgatgcagggagtgaggagcaggacagtgaaggtgggaaggagcctgatgcagggagtgaggagccggacagtgagggtgggaaggagcctgatgcagggagtgaggagctggacagtgaggatgggaaggagcctgatgcagggagtgaggagcaggacagtgagggtgggaagtggcctgatgcagggagtgaggcgcaggacagtgagggtgggaaggagcctgatgcagggagtgaggagcaggacagtgagggtgggaggcggcctgatgcagggagtgaggagccggacagtgagggtgggaggcggcctgatgcagggagtgaggagcaggacagtgagggtgggaagtggcccgatgcagggagtgaggcgcaggacagtgagggtgggaaggagcctgatgcagggagtgaggagccggacagtgagggtgggaaggagcctgatgcagggagtgaggagccggacagtgagggtgggaaggagcctgatgcagggagtgaggagcaggtgtgagggcgggaagcggcctgatgcagggagtgaggagcaggacagtgagggtgggaaggggcctgatacagggagtgaggagcaggacagtgagggtgggaaggagcctgatgcagggagtgaggagccggacagtgagggtgggaagcagcctgatctttgcacgggctgccaggcttctggttcatacagccccaggtcagtttccagaaccctcgctcttgggtaggggaaagagacattgctctggagtggcaggacggtgggagaagttgagtccctctcatttctcctccctcaccccctgccttccatcccagtctgaaggcagccaacctgatcctgggcttggaaggttgggggtgggcttcctatcctgggctctctgcataggctcttgtggcttcccctttcctcccctcaggagcgggaggcagctctctgggagaagaaaggacattgggagtgagaatctggatgtgcctcagcccagctctgtgtccttgggcaggtcacatggcctctctgagcctggctgaaccagggataatccacacctcgtggggtctctggaaggcttaacacagtgctaggttcctgtgctttctggatccgccctcttggctagccagatccagtctcttcaactctctcctcctgaactttctctttccaggctcggggggggggacccaaatatagggggttctgcgtggctgcctcagggttagatgccctggtgggaaaggggcttctggcttcaagatcaatgtttaactggatgtgcaagtcaatatttaccagaagagaaagcaatctgaacaggggttggctgagagtaaaggtcctggtgggaggggaggggtgggctgggccagctggagcctgggcagagagtgaggagcacccaagtggggccagaggaacgttgtgtgtggcagcaaggagcccgcagaggtatgaggggaggggctgctcggcctgctccttgggtaggagaggaggagggagctgcctccctggctgaggggtctgggatttattcaggaggcctgtcactccccagcctcttctgggacttgaaaaactggagcctgttcttggcaagaagattctaatgcccaggtcggagtcggggccctggccaagggctcttgtgtgggatgggggtggggccggggggaccaaaggatcctccagaagggttggccccaagatgggggtgggctggaggtagctgagacctgctctgacttatcctcctgagaccaacacctgcccttcccagagccagcctggagcagaggcctgtgatgctcctaagtgcagaggtggctctggccagagtcattcactgggctctgctgctgggtcaaaaggcagctctctggctgccttgccacccatggtgagacctcagggcctcacaggtatgtccagccttgtgggcaagacctgaccagcctgagaaagacgggttggggccaggcgtggtggctcatgcctgtcatcccagcactttgggaggctgaggcaggtggatcacctgaggtcaggagttcgagaccagcctgaccaacatggagaaaccctgtctctactaaaaatacaaaattagccaggcatggtggcacatgcctgtaatcccagctactcgggaggctgaggcaggagaatcgctttaacccaggaggtggaggttgcagtgagccgagatcgtgccattgcactccagcctgcatgataagaatgaaactccatctcaaaaaaaaaaaaaaaaaaaaaaaagacaggctaaatggatgcagcaggctgggtaggagctctgtgttggagctctgcggtggaggcttcagggcaggcttcccagaagaggtggccttgagccaagctgaccccagccatcgggggagtgccaagcattgtactcagggtttacaaagatggtcttatttatttttttgagacagagtcttgctctgtcgcccaggctggagtgcagtggcgtgatctcggctcactgcaacctccgcctcccgggttcaagcagttctctgcctcagcctcccgagtagctgggattacaggggcccaccaccacgcctggctaattttgtattttcagtagagatggggttttaccatgttggccaggctggtcttgaactcccgacctcaggtgatccacctgcccctggcctcccaaagtgctgggattacaggcttgagccaccgtgcctggccacaaagatggtcttttgccgggtgcagtggctcatgcctgtaatcccagtactttgggaggccgaggcaggaggatcacctgaggtcgggagtttaagaccagcctgactaacacagagaaaccccgtttctactaagaaatacagaattagccaggcgtggtggtgcatgcctgtaatcccagctattcgggaggctgaagcaggagaatcgcttgaacctgggaggtggaggttgcggtgagccgagatcctgccactgcactccagcctggtcaacgagagcgaaactccgtctcaaaaaataaacaacaaaaaatcccaaaaagacggtcttattttggtcctcaccatgcatgtgagaagagtgagggacttgtgccaccgttttacaaggtaaggccaagcctggtggagttacgggaaatgccgaggtcctttggcaagaggtagcctggattcagacacagatctgattcacagcgcagggccttgtagaatgagaacgtttttgatttggtatctccctcctattcaccaaaacaccctcagtgcatgaaatgcatgaaatatgaaacaccagaaactaaaaagggggagaagccagggcggatgtcccagctgcaggagtgggagccgctgctcgtgtgtttggggtctgttctgattctggagcctgcttcttccccttggcaatcatgacccaggacttggcgttatctgtgatcgcgtgggtaggattccctggcgggcgtggggatgtgagatgggaacagagctttctgtccctgccacaggaacatggcgctgctctgggggctcctggtgctcagctggtcctgcctgcaaggcccctgctccgtggtgaggctgggctgaagtcaaggtggggtggggtggagggggaagaagaggggcgttggcatggagggagggcttggctccgaggggacctcctatcctcatccctttctccacagttctcccctgtgagcgccatggagcccttgggccggcaggtactggggagtgaggagcctgtgatggggggaaggtcccgggggtctcactggtggcttgggcagggtggggggcctgtgggaagggtcggtctccatctgcttgctcctttccgcagctaactagcgggccgaaccaggagcaggtgtccccacttaccctcctcaagttgggcaaccaggtacaaccaggtggggctggggaagagtgggcggggctagagggaggagggcccatcggcaggggtcggggggtgggggcgcgtgctgaggctgaggctctggagtccagaggccagaagggagagagggtggggaggaccgaaggtgggcgccaggccccagaatgccagtgccctccgtctgacgctccctcttccctggggctgggacaaggccctgctgtcctcaggcacaggggctgtgacaaggccttcaacacagaacctggagctgaccccttgacctccctgacccctgatctgtccctgcaggagcctggtggccagactgccctgaagagtcccccaggagtctgcagcagagaccccaccccagagcagacccacaggctggcccgggccatgatggccttcactgccgacctgttctccctggtggctcaaacgtccacctgccccaacctcatcctgtcacccctgagtgtggccctggcgctgtctcacctggcactaggtaccctggcaccacttgtccagaccaagagagctgggaggccagtaggaactcagtactccaatggttctccgcgggcggttcctccaccagggtcacgtggctgtttggtaaaaatgcagattcctaggccggggcggtggctcacgcctgtaatcccaacactttgggaggctgaggcgggtggatcacgaggtcaggagttcaagaccagcctggccaacatggtgaaactctctctactaaaaatacaaaaaatttagctgtgcgtggtggtgcgcacctgtaattccagctactcaggaggctgaggcagagaactgtttgaacctgggagttggaggttacagtgagccgagatggcgccactgcactccagcctgggtgacagagcaagattccgtctcaaacaacaacaacaacaaatgcagattcctgggcccccacccatctgtctatgtgaatcagatctcagggactgggccggggaatctgcttatttacaagtcctcctggtgattttttttttttttttgagacagagtcttgctctgtcacccaggctagagtgcagtggtgtgatctcagctcactgcaacctctgtctcccaggttcaagcaattctcctgcctcagcctcccaaatagctgggatcacaggcaccagccaccatgcacagctgatttttgtatttttagtagagacggggtttcaccatgttggccagggtggtctcgaactctcgacctaaggtgatcaacctgcctcagcctcccaaagtgctgggattacaggcgtgagccaccgcgcccggcccctcctggtgattcttatgcaagagtttgctagctacactctttcccactgtgctggagggtctcactgtgggaaacggaagcccagagagggaaggtaacttgtggggggtgaggtcacccagcctgtcagccacaggggtgagagccacgcagaacagatccgtggctgtggaaggatggcgtgtggtcccgtggacgtcctcgtcacgggtatccaggagggactggagtgggcagtgggggtgagaaaggacccgcagccgggcctcagcctgtgcggtgccctccaggtgctcagaaccacacgttgcagaggctgcaacaggtgctgcacgcaggctcagggccctgcctcccccatctgctgagccgcctctgccaggacctgggccccggcgcgttccgactggctgccaggatgtacctgcagaaaggtaggcgctgatggcagggagctccctcagtcctgccctgggtggaggagggtgagagcaaggggctgggcctctggtagcgagtaggggcgtgtctggctgtggagcctggagccctgggaacagcttgtgctgcctccgtgcaggatttcccatcaaagaagatttcctggaacaatccgaacagctatttggggcaaagcccgtgagcctgacgggaaagcaggaagatgacctggcaaacatcaaccaatgggtgaaggaggccacggaggggaagattcaggaattcctctctgggctgccggaagacaccgtgttgcttctcctcaacgccatccacttccagggtgcgctcctcctcctctcagatcccccaccctgtaggctgagctgggacgtgcaggcctttttgttttttgagacaagtctcgctctgtcacccagggtggagcgcagtggcgcgatctcggctccctgcaacctccgcctcccggattgaagcgattctcctggctcagcctccccagtagctgggattacaggcatctgccaccacacccagctaatttttgtattttagtagagacagggtttcaccatgttggccaggctggccttgaactcctgacctcaggtgatccacccacctcggcctcccaaagtgctgggattacaggcgtgagccaccgcgcccggccatgcaggctttgttctgagggtctcctttcttcctcagtctgggccatgaggcaggaggctgtctgggtgtggtggggatgggtgcccaggagccagatgagttgttctagagtgaataccctgggaacaaatggtctgaaaagatccaggaggggctgggcgcggtggctcacgcctgtaatcccaacactttgggaggccgaggcgggcagatcatgaggtcaggagatggagaccatcctggctaacacggtgaaacccccgtctctgctaaaaatacaaaaaaattagctgggcgtagtggcgggcacctgtagtcccagctactcgggaggctgaggcaggagaatggcgtgagcccgggaggcggtggagcttgcagtgagcggaggtcgtgccactgcactccagcctgggcgacagagcgagactccgtctaaaaaaaaaaaaaaagatccaggaggaggttcctaggagaattgcaggggttggggaaaacacaagcccagatttcaaaaatgctacgggaaagagaccttagatcaattggatgccagctagcattccctggggtcttggcctccaccgctgtctcatccttgaatggattctgggtgggacaggcaacgggctgggggtgcagagcccaagctggtccccatcgacgtgacccctgccctctgccccaagctggtccccgtcgacgtgacccctgccctctgctgggtttcaggtttctggaggaacaagtttgacccgagccttacccagagagactccttccacctggacgagcagttcacggtgcccgtggaaatgatgcaggcccgcacgtacccgctgcgctggttcttgctggagcagcctgagatccaggtcacccttggttgtccagcaggctgggcctgaggctgggaggtggggaagggagtggacaggctgtggagcaggcacagggatgggtggaggctgtctcgccttccttgcctccacgtcccctaggcaggcaactgcaaaaggtcccatgatcccccatcctacctggcaggaggactgaggctccaggctctttgaggtttagtaattcagtgaaaatatactgggcatttgctgtgttccagatactgttctaagcactagggtttttgtggagcatgagggaggccaggtctctgctcttaggaaggaggatacacagtgcaacagtgaatggacatcaacacaggaattccagacgctgggaagcgctgtggagggaaagctgaaaaagaaggtgattttggccgggagcggtggctcacgcctgtaatcccagcactttgggtggcccaggcaggtggatcataaggtcaggagtttgagaccagcctggccaagatttgaaaccccgtttctactaaaaatacaaaaattagccaggcgtggtggcaggtgcctgtaatcccagctactccagaggctgaggcaggagaatcacttgaacccaggagggaaaggttgcagtgagctgtgattttgaggtcaggagttcgagaccagcctgaccaacatagcaaagccccgtctctactaaaaatacaaaaattagccagccatggtggcgggcgcctgtaatcccagatactctggaggctgaggcaggagaatcacttgaacccgggagacggaggctgcagtgggctgagatcgcaccactgcactccagcctgggagacagattgagactccgactcagaaaaaacaaaggctggccttgaactcctgacctcaggtcatctgcccacctcggcctccctaagtgctgggattacgggcatgagccaccaggcctggccttatttaggcattttagagtggtaagggagaattctgtgaggagggggcattgaattgagactcaggtgaccgttgttgataagggtttattacaagggcccatggactttggggcagcacagggaccaccccacggccatgtagccactcagggtctctgcagcccccagcctgggagattccacggggcgctcacacagtgctccttagaaaggaggatctgattggattggatttctcagcatcttgcgtggaacattctgattggataaacttcttttttttttttttgagacagagtcttgctctgtcacccaggctggagtgcagtggcacgatctcggctcactgcagcctctgcctcctgggttcaagccactctcctgcctcaacctctcgagtagctggaactacaggcatgcaccaccacgcctggctaattttgttcgtttgtttgtttgtttttgagacggagtttctctctatcgcccagactggagtgcagtggtgcaatctcggttcactgcaatctctacctcccgggttcaagggattctcctgcctcagcctcccgagtagcttggactacaggcgcccgccaccatgcccagctaatttttgtatttttagtagagacggggtttcaccatattggccaggatggtctcaatctcctgacctcgtgatccgcctgcctcagcctcccaacgtgctgggattacaggtgtgagccaccgtgcccggccaatttttgtattttttttttttagtagagacaggtttcaccatgttggccaggctgatctcaaactcctgacctcaagtgatccgcccgccttggcctcccaaagtgctgggattataggcaggagccactgcgcccagctctgattggataaaattccgtgccaggctgtctcaggtgtggcctctcttgcttctagcctaaatgtggtccccttggcctgggtattgatccccgggccagacagctgtggctgagatggctgtatttgttagcttcccaaggcaagtgtgacacagagcacagccacttctgcagggaggagccagaagccacttgggcagccctcctgggagggggctgtgggtgaggctggcccgggaacgcgtcctggcttccctgcagctcattctgaaaggccagtctgatccacctccccgaggctcccctttcctgcttcccctttcctccaggctgtgtcctgcgtactcttccttcatccttcgtctcctttccttaggccccgtcagcctttcttgtcctcaggccctctgcagacaggcccaaacagccagaacccggggcttatcctcccacgggcaggggttctccacacgggtactctgcctggaacccaaggagtcacagctgcaggaggccctcgagccctgtggtgtccacactgcttttgctgcagaatcccttcaaatcaaatcttaatggctgggcacggtggctcacgcctgtaatcccagcactgtgggaggctgaggcaggtggatcacctgaggtctggagtttgagaccagcctggcccacatggtgaaaccccgtctctactaaaaatacatcaattggccaggtgagatggtgagcgcctgtagtcccagctactcgggaggctgaggcaggagaatcacttgaacccgggtggcagaggttgcagtgagccaagatcatgccactgcactccagcctggacaataagagtgaaactctgtcttgaaaaaaaaaaaaaaagaggctgggtgtggtttacaggctcatgcctgtaatcccagcactttgggaggccaaggcaggtggatcacgaggtcaggagattgagaccatcctggctaacacggtgaaaccccatctcttctaaaaatacaaaaaattagccgggcgtagtggcgggcacctgtaatcccagctactcgggaggctgaggcagaagaatggcgtgaatccacgaggcggaggttgcggtgagccgagattgcgccactgcactccagcctgggcgacagtgcgagactccaactcaaaagaaaagaaaaaaaaagaaatcttaagccaaatcacaatatatttacacagctggcaaagtcacaagagggaggtgtgggagggtggggcgggcagcactcggcagtggctcacccacagaacccagctgtggtatgacagccagtgaccctgtctgtggtacatctggagaagctgagacaaagacaggcgattccttacgccgggtcacacggccagctggtagccggtgaagagagaaaaccaccaggtattattgagcaccgtctgtgacagcggacactgctacaatgttgttttttttctttttttgagacggatttttactcctgtcccccaggctggagtgcagtggcttgatcttggctcatggcaacctctgcctcccgggttcaagcaattctcctgcctcagcctcccgagttgctgcgattacaagcgcccgtcaccacagaagcccagctcatttttgtatttttagtagagatgaggttttgccatgttggtcaggctggtcttgaactcctgacctcaggtgatctgcctgcctcggcctcccaaagtgctaggattacaggcgtgagcccccatgcccggccacactgctagaaactttaaaagcatctcattcggttacgtgtccgcctgcagtgggacaggtagtatgactccaccccactgtgaggaagtggaggagcagtggggtcagtcacacgcctggcaggatggccaggagccccattgtctgccttaggagcacctgctggccccacccccacttagcttcggggctttctgtcctcatgctcttcccttcccttttctgtaggtggctcatttcccctttaagaacaacatgagctttgtggtccttgtacccacccactttgaatggaacgtgtcccaggtactggccaacctgagttgggacaccctgcacccacctctggtgtgggagaggcccaccaaggtccggctgcctaagctgtatctgaaacaccaaatggacctggtggccaccctcagccagctgggtaaggaggagggtgcgggcgagcccccgaggtcaggctgggcagggcgggtaaggaggaagcgtctggctggcagtggagctgagtcagagctgtcctgtgtcctgctcttttccagggcttcgggagcggggagagggttgaatatgagcccccagaccctctgtcctagaggaagttggggtggcccggggaatggggctctgctttgctgcccaagacctcgcattgcaaggagagtctgggtagagagcctgggatggcatgtgagcctcgctggcttccctggaaggggaaggaggagaagctggggtgtcacactgttaaagaaatgctgggtggagtggctcatgcctgtaatcccagcacgttgggaagctgaagtgggtggattgcttgagcccgggagtccgacaccagcctgtgcaacacattgaaactccgtccctacaaaaaatacaaaaattagccaggtgtggtgcatgctactggggaggttgaggtgggaggccctcttgaccccaggtggctgaggctgcagtgagccataattgtgccactgcactccagcctcagcaaaagaactaagaccttgtctcaaaaataaaaataaaggccgggcatggtggctcacgtctgtaatcctagcactttgggaggccaaagagggtggatcacctgaggtcatgagtttgagaccagcctggccaacatggccaaacccgtctccactaaaaatacaaaaattagccgggcgtggtggcgcatgcccataatcccagctacttgggaggctgaggcaggagaattgcttgaacctgggaggaggaggttgcagtgagccgagatcacgccactgtactccagcctggatgacagagtgagactccatctcaaaaaaaaattataataactaaaataaataaataaagcatctatccttcagccatttgctaagcagctgctgtattccaggcactgtaccaggtaccgggagcccaccatgtacaaacagctgagtctaatggggtgggcagacgagcaatcacatacttactacagcataagcgataagacagagagggcttctctccagctcacctgggagaacactgaaaatgtaccttggttggactttagagctggggatcagggaaggcttcctggaggaggtggtgtttaagctgagtcttggaaaccggataggaatgaagcaggtatctgtgagttcaagctgttccctggccaggatctcagacaccctcccaagcagctccaggagcctgtgaggccaagggcagctctgaccagccatctctggccctgggcaggcctgcaggagttgttccaggccccagacctgcgtgggatctccgagcagagcctggtggtgtccggcgtgcagcatcagtccaccctggagctcagcgaggtcggcgtggaggcggcggcggccaccagcattgccatgtcccgcatgtccctgtcctccttcagcgtgaaccgccccttcctcttcttcatcttcgaggacaccacaggccttcccctcttcgtgggcagcgtgaggaaccccaaccccagtgcaccgcgggagctcaaggaacagcaggattccccgggcaacaaggacttcctccagagcctgaaaggcttcccccgcggagacaagcttttcggccctgacttaaaacttgtgccccccatggaggaggattacccccagtttggcagccccaagtgaggggccgtggctgtggcatccagagtccctgcctggaccagcctctccactcatgtgactctttccaaccggctttgtggcactggggcaggggccgggggcagtctgagagaggccattctttcccaacacctcttggggagtttagggtggggggggggcgcggctgggaggagggcaggcatcggggagccgggagcctgaccctcatctttcttccaaacaggctcagagggtgtcctgcaccggggcctgggcaggagggaggtgcttctagttctgccaggagacaggttagctgctccccacgtcagctgggacaccccgacttttgtttaccagagaaaaagggagggggagagggctgcctttggacttgtcccgggacacctaggctagggtggggagagacgggccctggtggtggctcgggaggcgaagcgttgtcctcagccccgcgtggaactcgtgtctggcacagcctggctgtggcctaacctgccgagagtccatcagcctccatcctaccccctgtgccttgtcacgccagacttcccacggctcctcgagatcccaacactgccagcatttcccttccttcctctcctgtctccctcctctgcccgggagctcaggaaccgaggcagggaaggatcccatgagctccttaaggctcttttgtaaggtttttgtagtgatttttatgccacctgaataaagaatgaatgggcctggctggtttgatgtcaccgttctgggcatgggtggggacaagtgaggatggtggggaaggcagggaggcggccgcagggtggactgtgctgaggaaccctgggcccagcaggggtggcagcccgcgcagtgccacgtttggcctctggccgctcgccaggcatcctccaccccgtggtcccctctgacctcgccagccctcccccgggacacctccacgccagcctggctctgctcctggcttcttcttctctctatgcctcaggcagccggcaacagggcggctcagaacagcgccagcctcctggtttgggagaagaactggcaattagggagtttgtggagcttctaattacacaccagcccctctgccaggagctggtgcccgccagccgggggcaggctgccgggagtacccagctccagctggagacagtcagtgcctgaggatttgggggaagcaggtggggaaaccttggcacagggctgacaccttcctctgtgccagagcccaggagctggggcagcgtgggtgaccatgtgggtgggcacgcttccctgctggaggtgcagggggtccacgtggcagcggccacctggagccctaatgtgcagcggttaagagcaagcccctggaagtcagagaggcctggcatggagtcttgcttcttgcaaacgagccgtgtggagagagagatagtaaatcaacaaagggaaatacatggtctgtccgaggatgagctgccggagagcaatggtgaaagtgaagtgggggagggggcggggctgggaggaaaagccttgtgagaaggtgacacgagagcacggccttgaaggggaagaaggagggcactatggaggtcccggcgaagcgtggcctggccgaggaacggcatgtgcagaggtcctgccgaggagctcaagacaagtaggggacggtggggctggagtggagagagtgagtgggaggaggagtaggagtcagagaggagctcaggacagatcctttaggctctagggacacgataaacacagtgttttttgtcttgtcaagtgtgtcctttttatttttttgaaagagtctcgctctgtagcccaggctggagtgcagcggtgcgacctcggctcactgcaacctctgcctcccgggtccaagcaattctcctgcctcagcctcccgagtagctgggattacaggcatgcgccaccacgcactgctaatttttgtattttagtagagaccgggttttgccatgttggtcaggctggtctcgaactcctgacctcaggtgatccgcccgcctcggcctcccagagtggtgtgagccactatgccctgcagcacttgtcaagtctttctcagcgttcccctcctctccactgcagctcccagtgccccagtctgggcctcgtcttcacttcctgggatccctgacattgcctgctaggctctccctgtctctggtctggctgccttcactgtaacctccacccagcaggtacctcttcagcacctcccatgaacccagcagaataccaagccctggggatgcagcaacgaacaggtagacgctgcactccagcctgggcgacagagcaagactccgcctgaagaaaaaaaaaaggaccaggccgggcgcggtggctcacgcctgtaatcccagcactttgggaggccgaggtgggtggatcatgaggtcaggagttcaagaccagcctggccaaaatggtgaaaccccgtctctactgaaaaatacaaaaattagctgggtgcagtggcgggcgcctgtagtctcagctactcaggaggctgaggcaggataattgcttgaccccaggaggcagaggttgcagtgaaccgagatcacgccactgcactccagcctgggcgacagagcaagactctgcctcaaaaaaaagaataaaaataaaaaaaaggaccagatacagaaaacagaaggagacgtactatgaaggaaattggagagcttttgggatactgagtaactcagggtggcctttcccaggggacatttagctgagagatagacggtatgaagacctgaccgttcagaaacaggggaagaggcagcagcccgggcaaaggcctttggggcaggaaagggcttggatcactggagaagcagaaagatggccagtgtgaccagagtgtgacaaagtcagagaaaaccaggaagatggagctggagacacaggcggggccagatcacgagggtccttgcagaccagagcaagggtttggattttattccaagtatgaagggaagctgctgaagtgtgttttcctttacaatttgtagttgaaatataatatgcaaagtacacaagtcttaactatatgtaagcttaatgaatgtttccatgaaccaaataccgctgtgcaaccatcaccagctcaagagacgaacccttctccctcctcctgactgccagtaacatagtggttcagctcaagaaacagaactcttctgacttcccctaacatagcgggttttcttttttgttttgttttttgttgttttttaagagacaatgtctttattatttttatttttttttatttttgagacggagtcttgctgtcgcccaggctggagtgcagtggtgcgatctcggctcactgcaggctctgccccccggggttcatgccattctcctgcctcagcctccctagcagctgggactacaggtgcccgccacctcgcccggctatttttttgtatttttagtggagacggggtttcaccgtgttagccaggatggtctcgatctcctgacctcgtgatccgcccacctcggcctcccaaagtgctgggattacaggcatgagccaccgcgcccagccaagagacacggtcttgctctgtcgcccaggctggatggagtgccgtggtgcgatcacagttcgcggcagccttgacatcctgggctcaagcaaccttcctgccttggcctcccaaatgttgggattataggcatgagccactgtgcttggcatctattcatctttaatgtcaagcaggcaattgaatatttgatcagggatagaattgtctatttgggggtatgcagatgtgcttcatgtcatggaactgggccgggcacggtggctcatgcctataatcccagcactttgggaggccgaggcaggcggatcataaggtcaggagatcgagaccatccgggccaacacggtgaaaccccgtctctactaaaaatacaaaaattaggcaggtgtggtggtgcctgcctgtagtcccagctactcagggaggctgagacaggagaattgattgaacctgggaggcagaggttgtagtgagccaagatcgcgccactgcactccagcctgggcgacatgagcgagactccgtctcaaaaataaacaaaaaaaagtcatggaattgatggaaattgcctaaggggagatgtagaagaaaaggggtctcaggatcaagccagcagagaaggcagaaaaggtaaggtgtgtgaggtggcagaaaaagggaagagtgtggacagtgagggtttcaaggaggaggaactgtctactgcctcctgccaaggacggaggtgtccactgccagttgacataaggtcacccatgaacttggtgacaggaatttcagtggagaagtggccacagacacaagtctagaattgaaatgggagccgaggcagcgtagacaaaagaggaaactgctccttccagagcggctctgagcgagcaccgagaaatgggcagtggctttaggggatgtagcgtcaaggaagtgtcttttaaagaagtcgggggccgggcacggtggctcacgcctgtagtcccagcactttgggaggccgaggcaggcagatcacttgaggtcaggagttcgagaccagcctggctaacacgatgaaaccccgtctctactaaaaatacaaaaaattagctgggcacggtggctcgtgcctgtaatcccagcactttgggaggcagaggtgggcagatcacttgaggtcaggagtttgagaccagcctagccaacatggtgaaaccccatctctactaaaactacaaaaattagccgggagtggtggcacgtgcctgtaatcccagccagtcaggaggctgaggcaggagaatcactggaatcctggaggtggaggtggcagtgagccgagatggtacctctgtactccagcctgggggacagagtgagactccgtctcaaaaaaaaaagaaggtggggaaggatctttgagggccggacacgctgaccctgcaggagaggacacattcttctaacaggggtcggacaaaagagaactcttctgtataatttatgattttaagatttttatttattattattttttatagaggcaagcatttttcaccacgtcacccaggctggtctccaactcctgggctcaagtgtgctgggattatagccatgagtcaccacacctggcccagaaactttactaaggacttatttaaatgatttgcttatttgtgaataggtattttgttcacgtggttcacaactcaaaagcaacaaaaagcacccagtgaaaagccttcctctcattctgatttccagtcactggattctactcttgggatgcagtgtttttcatctcttttttgtatccttttggaaatagtattctgctttaaaaagcaaatacaggccaggtatggtggctcactcctgtaatcccagcactttgggaggccgaggcaggtgatcacctaaggtcaggagttcaagaccagcctggccaatatggtgaaaccctgtctgtaccaaaacacaaaaacaaaaacaaaaacaaaaattagccgggcgtggtggcgtgctcctgtaatcccagctactcaggaggctgaggcaggagaatcgcttgaacctgggaggcagaggttgcagtgagccgagattgtgccactgtactccagcctgggccacagagcaaggttccatctcaaacaaaacaaaacaaaacaaacaaaaaaacaaaacaaaagctaatacaaacacatatacaatagacaaaactgtaaatattttattatttttattttttttagtagagacagggtttcaccatgttggccaggatggtctcaaactcctgacctcaggtgatccacccacctcagcctcccgatagttaggattacaggcatgagccaccacacccggcctaaaattgtaaacgttttagaagaaagtatagatgaatcccttcgtgatctcggggaagaagagattttttaaaaaagataccaaaagaagcacaaattataaaagaaaagattgaaaatgttggtgttaaaattaaaaacttgttttaaaacaagcttgtgtaacccatgacccacaggctgcatgtggcccagaaaagctttgactgcagcccaacacaaattcgtaaactttcctaaaacattatgagattttttttgagattttgttttgttttgttttttgtttttttagctcattcggtatcattaatgttagcatattttacgtggggcccaagacaattcttcttccaatgtgtctcaggggagccaaaagattggacacccctgccataaacatgaaaagacaatggccgggcacggtggctcacgcctgtaatcccagcactttgggaggctgaggggggcgggatcacctgaggtcaggagtttgagacaagcgtgaccaatgtggtgaaaccctgtctctactaaaaatacaaaaattagccgggcatgctcgtgcacacctatagtcccaactactcagcagggtgaggcaggagaacctcttgaacccgggaagcggaggttgcagtgagccgacattgcacccctgcactccagcctgggtgacagagtgagtctccattggaaaaaaaaaaaaaagaacagtgtgatacattgacctaaggtttaagaacatgcaaactgatactatatatcacttagggacaaaaacttacatggtaaaagtaaaaagaaatgtacgaaaataataaaaatcaaattcaagatggtggttatggtgacgggaaagaactgaggcggaaatataaggttgtcactatattgagaaatttttctatctttttttcttttttctttttttgagacggggtctcgctctgtcgcccaggatggagtgcagtggtgtgatctcagctcactgcaacctccgcctcccaggtttaagtgattctcctgcctcagactcccaagtagctgggactacaggtgcgcgccaacacacctgggtaattttgtttgtatttttagtagagatggggtttcaccgtgttggctaggctggtctcgaactcctgacctcaggtgatcccccggcctcggtctcccaaagtgctgggataacaagcgtgagccactgcgcccagctttgtttgcatttttaggtgagatggggtttcaccacgttggccaggctggtcttgaactcctgacctcaggtgatgcacctgcctcagtctcccaaagtgctggattacaggcgttagcccctgcgcccggcccctgaaggaaaatctaaaggaagaggaaggtgtgcaaatgtgtgcgccttaggcgtaatggatggtggtgcagcagtgggttaaagttaacacgagacagtgatgcaatcacagaatccaaattgagtgcaggtcgctttaagaaaggagtagctgtaatctgaagcctgctggacgctggattagaaggcagcaaaaaaagctctgtgctggctggagccccctcagtgtgcaggcttagagggactaggctgggtgtggagctgcagcgtatccacaggtaaagcagctccctggctgctctgatgccagggacggcgggagaggctcccctgggctggggggacaggggagaggcaggggcactccagggagcagaaaagaggggtgcaagggagaggaaatgcggagacagcagcccctgcaatttgggcaaaagggtgagtggatgagagagggcagagggagctggggggacaaggccgaaggccaggacccagtgatccccaaatcccactgcaccgacggaagaggctggaaaggcttttgaatgaagtgagtgggaaacagcggaggggcggtcatggggaggaaaggggagctaagctgctgggtcgggtctgagcagcaccccaagactggagcccgaggcaaggaggctcacgggagctgcttccaccaagggcagtcaggaaggcggccgccctgcagcccagccctggcccctgctccctcggctccctgctactttttcaaaatcagctggtgctgactgttaaggcaatttcccagcaccaccaaaccgctggcctcggcgccctggctgagggctgggatggaggacagctgggtccttctagccagcccccacccactctctttggctacgtgagtcaaggctgggcgaccaatgaggttgtggcctccggcaaacaatgaccactatttaggccggcaggtgtatagggcatgggggcccagctgccagtgctggagacaagggccgtccgagatgaaccctttctgctgcctgccaagccactgggaggggtaggtctcagcaggattcccagaaaccccgcccctgtccagcctaggccccccacccggtgttagctaacccaacgttagcccccaggttccgtggggttggagggcagggagtcctattcttggggctgctgcttctggggtgtggggaagtgcaactccacggcaccctgggctgactcattcagcttctaaagcttcaggaaacattgtttggggctgggtcaccatgggtgggccagagaggacccctcaatcccctccggagagccaggggagggggaggtgcccttccccatgctatctccgaggcccactgccatgtggctgaaggctgtgcggttctgggaagagggggaggtggcggtggaggctgtttgtctcctaactgggcttaatctgaaacacatgtattggcttgagttgatccgcctcacgtggaggcaagatcacaaaagcttctgtgtttcttgatgtgggcaattgtcagaaaataaggcctgaccttggcccagcagggagggtatctacctctccctgagccctcccccgcctgctaggacgagagcggggcttggatactgccctttggacaggatggcatcattgtctgtggctgcagccagccagcggtcgcctgctcagcccatgagcaaccactgtggacagggtattgcgtgtgtgctgaggggcgtccatgcagacccccacgcttgccctctcactgcccttgtagggttttcaatcatctctcctcttcccttatccagatggcttgaagtggaggattcagacttgccgttaatactctgggtccctgtgtctagctcggggccacctttggacccatgtcccttccctgccaggctccctcacctcacctcagcctacccacattgtgacaatcatctaccacctgatctggggtttgggcttagattctgtaggcaccaagactaaagtcgctccttcaagtccatttgaattgtgactttagtttccttaaatactatgccaggataatggccagggatggtggctcacgcctgtactcctggcactttgggatgctggtggatcacctgagatcaggattccaggccagcctggccaacacggtgaaaccccatctctactaaaacataaaaattaaccaggtgtggtggcgggcacctgtaatcccagctactcaggagactgaggcaggagaattgcttgaacccgggaggtggaagttgcactgagctgagatcgcgccactgcactttagcctgggcgacaagagtgaaactctgtctcaaaaacaaaaaaaactatgccgggatgagcctgtctcctcccttaatttcttacttgggccagaggaactagaactaacaacttctcttctagccttgcctcctgtgtacctcactgaatttttggtctctaataaaccagtctgcagaggctcaggggaggcaggctcctggcagctgggtggggctggccccagccgggtggagaccagctgtaggcctggatggtggtgaggcctctgtcttgcgctgcagaaagcttttcctgttgtctacacgaaagttttctccctgcatgtcagggcagccacgtgcaagagcagctggctgggaacgcagaggtctgcggctcgaggcggggtttagaaagaaaaccaggctgcttcctgctgcccgtcctgccttaagctgagtaaactcaaaggcaatcttctttcatgcctcacgatattgtccagtggattatctgatttaatttgaaggacgagagccaacaatcacacaacgtcctcccaaattttctgatccactttgttctgggaagtcaaaaagtgtgtgtgctgtgtgggtggatgtttgtgtatataaatggataatgaaggatgatgtgttgggggccagggcaggggagacaacgctgttcagattctacatttttttttccttttttttttttttttgagatggagtcttgctctgttgcccagcctggagtgcagtggcgcgatctcagctcactgcaacctccacttcctggattcaagtgattctcctgccttagcctcccaagtagctgggattacaggcatgcgccaccacacccggctaatttttgtatttttagtagagatggggtttctccatgttggccaggatggtctcaaactcctgacctcaggtgatctacccgcctcggcctctcaaagtgctgggattacaggtttgagccactgcgcctggcctttttttttttttttgagatggagttttcactcttgttgcccaggctggagtgcagtggtgcgatcttggctcactgcaacctccacctcccaagttcaagtgattctccagccttagccctccaagtagctgggactacaggtgtgtgccaccatgcctggctattttattttattttattttatttatttatttttgagactaagtcttgctctgttgcccaggctggagtgcagtggcataatcggctcactgcaacctctgcctcccaggttcaagtgattctcctgcctcagcctcctgagtaactgggattacaggggcctgccaccacgcctggctactttttgtatttttagtatagatggggtttcaccatgttggccaggctggtctcgaactcctgacctcaggctatccgcctgcctcagcctcccaaagtgctgggattacaggcatgagccactgtgctcggtagttgttttattttaatagtaggttattttatttccattttacaagagaaaaaatggtgatttaaagagctactaagacacagcactgagaccatgtgtgatggcatgcgcctgcagtcccagctactcacgaggctgaggcaggaggatcacatgaggtcaggagttccaggctgtggagtgctatggttgtgtagtgaatagccactacactccagcctgggcagcacagcaagatcttgtctcccaaaaaaaaaaaaaaaaaaaaatttcaaatgtgaacccaggatctctgaccctaggccctgcactcctaaccatgggaggaagagctcttgaaagggaactgtgggagaagggaatgagctgccttgtgaggccacagaagtccaaagacagcttgagaatttggagggacagcacgtgccggactgggtgcctctatgcttggtatccggtgattccatggaggagacctgggttctgccccattctcctgggaggggttgcccaaagtcttatcaccggagtgggtcagctgcctccaggacaaagctttagcatacacttgtgctgggccatactccacgtggagaagccctgctggggctggggccccactgctctggatctttaaaagctattggttcaggggccaggtgtaatggctcacacctataaccctagcactttgggaggctgaagcaggtggatagcctgaggtcaggagtttgagacaagcctgatgaacgtggtgaaaccccatcgctattaaaatacaaaaaattagccgggcatggtggcaggtgcctgtaattccagctacttgggaggctgaggcgggagaatcgcttgaacccaggaggcggaggttgcagtgagccaagatcgctccactgtactccagcctgggcgacagagccagactctgtttcaaaaaataaaatataaataaataaataaataaataaataaataaaagctttaggcttaaaggagggtcccctgacgcagacagtggaacaaaagcacaagcttatggtatgactgtgggccctgaggcagggggaggggcgggagaaccttgctgggagggatgggccatcaagctgagggtccacttctgggggcctggaggggtgaggggtggtcgctgcagggggtgggggaaagtgactagccctgcccaacccctgggtcctggctggggtggccaggaaggggtagcggggcagtgcagtgtcgggggagagcggcttgctgcctcgttcttttcttgcaggccccaggatgcaggccctggtgctactcctctgcattggagccctcctcgggcacagcagctgccagaaccctgccagccccccggaggaggtcagtaggcaggcggggagggcgtggtcagcattccccgcccctccttggcaggcagcacgggaaacaggacagggaacccggacccaggttccaggccaggcttgggcctttatttctctagggctggagtttctccagcagcaaaacagagagaaaatgtcttgccttgcctttcaggggatggagtagggacatgaataagatcccaaaagagtaaaaatctgaagcacttttaacaagtccagggcaattctcctgcctcagcttcccaagcagctgggattacaggcatgcaccaccaagcccggctcattttgtatttttagtagagacggggtttctccatgttggtcaggctggtctcgaactcccgacctcaagtgattctcctgcctcggcctcccaaagtgccgggatgacaggtgtgagccaccgcacctggccaggatcttttctcattaccttgtcttcctagtgggggctccactgagcaggtcatgttcccggacatttgttcggatactgaccaggctgtggcagggagtgagggtatggagtgacctctctcctgcccagaaagggcgcagctgggttcccaaggcagatacaggcacatggagggaagcctgggccatatgagtgttatggggtgagtgttggcggaggcccacccttgagggacaagagcagctgggcatcttggcgagagccctggactttcgtgaggtcagagtatgaattctgcgtctccctcttcctagctttgtgaccctagacaacccttacctcagtctttgcttccttgcctatgaaatgggataaaaacacccattctacagggccatgtggccactcatttatttctcatctaccaaacacctactcgacaggggctggcaatgggcggaaataaaaactcagttctgccgggtgcggtggctcacacctgtaatcccagcagtgtgggaggcggagcaggatgatcccttgaatccaggagtttgagaccagcataggcaacatagtgagacccctgtctctacaaaaaagcaaaaattaccaggcgtggtggcaagtgcttgtggtactacctacttgggaagctgaggtgggaggatcacttgagcccaggagattaagactgcagtgaggggccgggcgcggtggctcacgcctgtaatcccagcactttgggaggcggaggtgggtggatcacgaggtcaggagatcgagaccatcctggctaacatggtgaaaccccgtctctactaaaaatacaaaaaattagctgggtgtggtggggggcgcctgtagtcccagctactcgggaggctgaggcaggagaatggcgtgaacccgggaggtggaggttgcagtgagctgagctcgcaccactgcactccagcctgggcgacagagtgagactccgtctcaaaaaaaaaaaaaaaagaaagaaagaaaaactgagttcttttttttaactttctttttttagagacagagtctcactccatcacccatgctggagtacagtggtgcgatcttggctcactgcaatcttggcctcctgagttcaaccaattctcatgcctcagcctcccaaatagctgggaccacaggcacgttccaccacgcccagctaattttttgggtatttttagtagagatggggcctcaccatgttgctcaggttggtctgaaactcctgagctcaagtgatccatcttcctcggcctgccaaagtgctgggattataggcataagccactgcacctggctcccaatttttatatttatatttatttttatttacttatttattttttgagacagggtctcactctgtcacccaggctggagtacagtggcactatctcagctcattgcaacctctgcctcctgggttcaagcgaatctcgtgcctcagcctcctgagtagctgggattacaggcatgcaccaccatgccccgttaatttttttgtatttttagtagagacgggtttcaccgtgttgcccaggatggtctcgaactcctgacctcaagtgattcacccacctcagcctcccaaagtgctgggattataggtgtgagccactcggctgatggtttttaaaaagtgggtcatggggctgggcgcggtggctcatgcctgtaatcccagcactttggtagaccgaggcgggtggatcacaaggtcaggagatcgagaccatcctgcctaacacggtgaaaccccgtctctactaaaaatacaaaaaattacccaggcatggtggtgggcgcctgtagtcccagctactcgggaggctgaggcaggagaatggcgtgaacccgggaggcggagcttgcagtgagccgagatcacgccaccgtactccagcctgagcgacagagcgagactccgtctcaaaaaaaaaaaaaaaagtgggtcataggtttcggcttataggtcacaagtgtttaaacctggccatgaggccaggcgcagtggcgcatgcctgtaatcccagccatttgggaggctaaggcaggaaaatcgcttgaaccggggaggtggaggttgcagtgagctgagatcgcgccactgaactctagcctgggtgacacagtaagactctgtctcaaataaaaaaaaaacagctgatctctcttctgcgctgtctctccacagagagctcatgcgtgatcagggagtaaaactcattcccgttttaggccaaacacagaaaaattaggaaggacagccccaaggggccagaaccaccaccctacacaaagccgtgaggagacagtccctgtgcatctctgcgagtccctgaactcaaacccaagacttcctgtctcctgccagggctccccagaccccgacagcacaggggcgctggtggaggaggaggatcctttcttcaaagtccccgtgaacaagctggcagcggctgtctccaacttcggctatgacctgtaccgggtgcgatccagcacgagccccacgaccaacgtgctcctgtctcctctcagtgtggccacggccctctcggccctctcgctgggtgagtgctcagatgcaggaagccccaggcagacctggagaggccccctgtggcctctgcgtaaacgtggctgagtttattgacatttcagttcagcgaggggtgaagtagcaccaggggcctggcctgggggtcccagctgtgtaagcaggagctcaggggctgcacacacacgattccccagctccccgaaaggggctgggcaccactgacatggcgcttggcctcagggttcgcttattgacacagtgacttcaaggcacattcttgcattccttaaccaagctggtgctagcctaggttcctgggatgtaactgcaaacaagcaggtgtgggcttgccctcaccgaggacacagctgggttcacaggggaactaataccagctcactacagaatagtctttttttttttttttttttctttctgagacggagtctcgctttgtcgccaaggctggagtgcagtggtgtgatctcagctcactgcaacctctgcctccctggttcaaggaattctcctgcctcagcctccagagtagctgggattacaggcacctgccatcatgcccagctaatttttgtatttttagtagagacggggtttcaccatgttgcctaggctggtctcaaactcccgggctcaagcgatccacccgccttggcctcccaaagtgctgggattacaggcgtgagccaccgcgcctggccagaataatcttaagggctatgatgggagaagtacagggactggtacctctcactccctcactcccaccttccaggcctgatgcctttaacctacttcaggaaaatctctaaggatgaaaattccttggccacctagattgtcttgaagatcagcctacttgggctctcagcagacaaaaaagatgagtatagtgtctgtgttctgggagggggcttgatttggggccctggtgtgcagttatcaacgtccacatccttgtctctggcaggagcggagcagcgaacagaatccatcattcaccgggctctctactatgacttgatcagcagcccagacatccatggtacctataaggagctccttgacacggtcactgccccccagaagaacctcaagagtgcctcccggatcgtctttgagaagagtgagtcgcctttgcagcccaagttgcctgaggcatgtgggctccatgctgcaggctgggggggtcttttttttttttttttgagacggagtctcgctctgttgcccaggctggagtgcagtggcgtgatctcggctcactgcaacctccacctcccgggttcacaccatcctcctgcctcagcctcccgagtagctgggactgcaggtgcccagctaatcttttttgtatttttagcagagacggggtttcaccgtgtttgccaggatagtctcgatctcctgacctggtgttctgcccgcctcgacctcccaaagtgctgggattacaggtgtgagccaccgcgctcggcccgtttctaaacaatagatcatgtgtgcccaggcctggcctggcactggtgtggaggaagggcccgtgagcccaaagaggctcagaaagaggaagtgggctgcaggagacggtgggaggggcagggagggcagtggcgcgatgtggggaaatctgctgcccccctggccagtgcctggggatgccagcagaagtcctggcaagtcacaggaagatgctggctgggaagtcagggcctgctgagcgctaaaccagaacccgagcctggcaggctctcaaagacgggatgcttgtcgtcgagtctcatacgctaacctctgctccgcctcttctcagagctgcgcataaaatccagctttgtggcacctctggaaaagtcatatgggaccaggcccagagtcctgacgggcaaccctcgcttggacctgcaagagatcaacaactgggtgcaggcgcagatgaaagggaagctcgccaggtccacaaaggaaattcccgatgagatcagcattctccttctcggtgtggcgcacttcaagggtgagcgcgtctccaattctttttcatttattttactgtattttaactaattaattaattcgatggagtcttactctgtagtcctaactggagtgcagtggtgcgatctcagctcaatgcaacctccgcctcccaggttcaagcaattcttgtgcctcagcctcccgagtagctgggattacagggatgtaccaccactcccggctaattttttgtatttaatagacatggggtttcaccatgttggccaggctggtctcgaactcctgagctcaggtggtctgcccgcctcagcctcccaaagtgctaggattacaagcttgagccaccacgcccagccctttttatttttaaattaagagacaaggtgttgccatgatgcccaggctggtctcgaactcctgggctcaagtaatcctcccaccttggcctcccaaagtgctgggattacaggcatgagccaccgcgcccggcccttttacatttatttatttattttttgagacagagtcttgctctgtcacccaggctggagtgcagtggcgcgatctcggctcactgcaagctctgccttccaggttcacaccattctcctgcctcgacctcccgagtagctgggactacaggcgcccgccactgcgccctactaattttttgtatttttagtagagacggggtttcaccgtggtctcgatctcctgacctcgtgatccacccgcctcagcctcccaaagtgctgggattacaggcgtgagccactgcgcccggcccttttacatttatttttaaattaagagacagggtgtcactatgatgccgaggctggtctcgaactcctgagctgaagtgatcctcccacctcggcctcccaaaatgctgggattaccatgtccaactttccacttcttgtttgaccaaggatggatggcagacatcagaaggggcttggaaagggaggtgtcaaagaccttgcccagcatggagtctgggtcacagctgggggaggatctgggaactgtgcttgcctgaagcttacctgcttgtcatcaaatccaaggcaaggcgtgaatgtctatagagtgagagacttgtggagacagaagagcagagagggaggaagaatgaacactgggtctgtttggggctttcccagcttttgagtcagacaagatttatttatttatttaagatggagtctcattctgttgcccaggctggagtgcagtggtgccatcttggctcactacagcctccccacctcccaggttcaagtgcttctcctgcctcagcctcccgagtagttgggattacaggcgcccgccaccacacccagctaatttttgtattttcagtagagatggggtttcgccatgctggccaggctgttctcgaaaactcctgacctcagatgatccacccgcctcggcctcccacagtgctgggattacaggcgtgagccactgcgctggccaaatcagacaaggtttaaatcccagctctgcctgtactagctgaggaactctgcacacatttcataacctttctgggcctacgttctcacctttaacgtgaggataatatatctacttcatagacacctttttatgttgtctccaagttttctaacagctctagttctgtacccaagacatggcaggtggccaacgacatccttctaggctgtggtgatgtgtttggagcttgttccacgggtcttgtgtggggccagccctgttcagataaggccttgtggggtggcctggggtagggggaggggttgggcaaactctcccttaaaacgctttgtaaccatctgaggcaccagcaagagcggcccccgagcctggacaaaatccaaacggcttcctacttcaagcactgatgtctagtgagtgaaggaacagctctgggtccaggatattataggtcacattaaactaaaggggcttggccatcagctggcttccagagcgtcagccagttacttcacctctttggctttggcctgttttcagctacaagaggacttaatccagaggacctcagaggtccttcccagctcagaccttctttgactgtctcccagagacactgctgtaggagtgcacaccagtttacttttctttcttttgtttttgagatggagtttcgctctttttgcctaggctggagtgctgtggtgtgatctcagctcactgcaacctctggctcccaggttcaagtgattctcctgtctctgcctcccgagtagctgggattacagacacccaccactgcacccggctagtttttgtattttcagtagagatggggtttcgccatgctggccaggctgttctcgaaaactcctgacctcagatgatccatccgccttggcctcccaaagtgctgagattacagatgtgaggcaccacacccggccatttttgtatttttagtagagacggggttttgccatgttggccacgctggtctcaaactcctgacctcaagtgatctgcccaccttggcctcctgaagggctgggactacaggcgtgagtcaccgtgcccggccatttttgtatttttaggacagcgttttttcatgttggccaggctggtctcaaactcctgacctcaagtgatccacccaccccggcctcccaatatgctgggattccaggtgtgagttaccatgcccggctaccactttacttttcctgcaggctatcacagaacgtgtacaatctagactctaatcaaccaaatcaacgtcttgccatcggagtttgctggtgaagggcacttggggtcctggaaataactgtaggctccaagccacacacactgagataggcctattccctgaggcctcagagcccctgacagctaagctcccttgagtggggcaattttcaacaacgtgctctggggacacagcatggcgccactgtctttctggtctcctggggctcagactatgtcatacacttctttccagggcagtgggtaacaaagtttgactccagaaagacttccctcgaggatttctacttggatgaagagaggaccgtgagggtccccatgatgtcggaccctaaggctgttttacgctatggcttggattcagatctcagctgcaaggtctgtagggataggggcagggtggggggtggatggagggagaggatagagaagcaaaacagggtagtgggaataaaatgacctttgagatccgacagctgtctacatgtcgcctgctgtgtgactttgagcaggttaataacatgtctgagctttcctcctcttaagatggggcaggggatcgttaccaacacttaccctcccagggtttgttgtaaggacgaataaggtaataggaaatgggccctcagactgggcacccacatgtttgttctcttgagactcctatttctagaatttaaagccaaactttgaaaaataatgacaaactccaaatcgttggcatctttttttttttttttgagacagtctcgctctgtcggccaggctggagtgcagtggcacgatctcggctcaccacaacctccgccccgctgggttaaagcgattctcttgcctcagcctcctgagtagctgggattacaggcgtgtgccaccatgcctggctaattttatacagacggggtttctccatgttggtcaggctggtctcaaactcccaaactcaggtgatccgcctgcctcggtctcccaaaacacagggattccaggcatgagccaccacgcttggccaatcgttggcattctaaggctttcagtgtacctgacttcttttagttctaagtctgtaactgttaacctttcttgggccacggctatcacacggatctctctgggaatctgacgacagtgcctcaaacccgagggagcaccgccaggtgtgcacacacgtttctgtcaacgatttcggagactcttgggatccctgacaccatctgttccatggaccttaggttaagagcctctgttcaaaggaggcttttgctcttggtgggtggatggggtgaagtctccaagccctcttacggccccttcggtattcctatccccggttctccctgtcttagtccagtgctctctatttaacaaatgagcagtaaatgttggccgatggactttgggagaaaataaagacctgaaattcaattctagctccttaaaccacaggagaacattctttcagcagacaacttcagttggtattaggccaaggtaagaaaggccaacagcatcctttctgaagaaacctcaggagatggctcactgccagaaagctataacctggaaggggaattgttaaatagatgaggggctggatgaaggacgagaccagggccccgtcacgggagagggaaggcagctcctggctgtgtctgtccccggcttttgggctctgaaggactaaccacatgctttctcacttgtctcagattgcccagctgcccttgaccggaagcatgagtatcatcttcttcctgcccctgaaagtgacccagaatttgaccttgatagaggagagcctcacctccgagttcattcatgacatagaccgagaactgaagaccgtgcaggcggtcctcactgtccccaagctgaagctgagttatgaaggcgaagtcaccaagtccctgcaggagatgagtatgtctgaagaccctttcgctcttggtgggtggatggggtggggcagggtctttgggccttccactgtgctaagcagaacgcaagggctccacaggcttgtaggggggccgtggatgagtccttaatcctcatcgtgccagaagggaaggctgaactgccttctctcatcagactcattcctcagcctcacgagcagacctccctgacaggcgctcacaacactgcctctcaagacgagtctgtctgacctgttttctcatcttgacctaacttgctaaatgctcctgggcaagtcactccaccctcggtcagctcagacctcttcaggcctcagagaaagtcaacagtgctgcgccatcccagcttgcttgcaaagggatcccttggttggggtgttggggaaggcagggttttaacggaaatctctctccatctctacagagctgcaatccttgtttgattcaccagactttagcaagatcacaggcaaacccatcaagctgactcaggtggaacaccgggctggctttgagtggaacgaggatggggcgggaaccacccccagcccagggctgcagcctgcccacctcaccttcccgctggactatcaccttaaccagcctttcatcttcgtactgagggacacagacacaggggcccttctcttcattggcaagattctggaccccaggggcccctaatatcccagtttaatattccaataccctagaagaaaacccgagggacagcagattccacaggacacgaaggctgcccctgtaaggtttcaatgcatacaataaaagagctttatccctaacttctgttacttcgttcctcctcctattttgagctatgcgaaatatcatatgaagagaaacagctcttgaggaatttggtggtcctctacttctagcctggttttatctaaacactgcaggaagtcaccgttcataagaactcttagttacctgtgttggataaggcacggacagcttctctgctctgggggtatttctgtactaggatcagtgatcctcccgggaggccatttcctgcccccataatcagggaagcctgctcgtaaacaacacatggacagataggagaggccatttgtaacttaaggaaatggacccgatacgtaaagattctgaacatattctttgtaaggaggtatgcctattttataaagtacagccgggtgtggtggctcatggctataatcccagcactttgggaggccgaggcgggcggatcacctgagatcaggagtttgagaccagcctgaccaacacggagaaaccccgtctgtactaaaaatacaaaattagcagggtgtggtggtacatgcctgtaatcccagctactggggaggctgaggcaggagaatcacttgaacccgggaggcggaggttgcagtgagccgagatcacgccattgcactccaatctaggcaataagagcaaaactccgtctcaaacaacaaaaaaccaaagtataactgggctttttgaagaacatgaaacatgcccagtgtctgaagtagaataactaccgaactgtccgtaggactaaactttttcttgaaaaagctctaccaaaaaaagtcaccggccactcccttgtcacagttattagacaggaggagaaatgataattctactgcccttcattctacaaatgtttgagtgctaactgtattccagattctcaaaaagctattgccaggtatctctggggctactgatttcctgatcataatgcaatggcaaccaacgggcacttgggcatggtgagggtgggcaagctttcaaaagcagcgtggatctggcattcttttccacgaatgcacctcaactacttggcaccagtggtaacacagcaaccagggttccgacctagagaatcccgtaaccttctgactggaacggggtctgggctgtcgctacacatcctggtggaaggcagctatcatccctaccttctgccttctgtctcttaaatctgaaccacaaacagcaacgtccataccctcagcattgttagaatcccctgcagcctccagttctcatactgtctgtattctactcgccagtttggagaggtctggtggagaaaaggagtctcttttcaggcttgacaacaaatagaactcagggccgggcgcggtggctcacgcctgtcatcccagcactgtgggaggccgaagcgggcggatcacctgaggtcgggagctcaagaccagcctggccaacatggagaaatcccatctttactaaaaatacaaaattagccgggcgtactggcgaatgcctgtaatgccagcttctcgggaggctgaggcaggagaatcgcttgaacctgggaggcagaggttgcggtgaaccaagactgtgccactgtactccagccttggtgacagagggagactctgtcttaagaaaaaaagaaaaaaaaaaaaaaagggccgggctcacgcctgtaatcccagcactttgggaggccaaatcacctaaggccgggagtttgataccaacctgaccaacatagtgaaatcccgtctctactaaaaatacaaaattagccaggcgtggtggcgggcgcctgtaatcccagctactcgggaggctgaagcaggagaatcacttgaacccggaaggcggaggttgccgtaagccaagatcgcgccattgcgctccagcctgggcaacaagagtgaaactccatctcaaaaacaaaacaaaacaaaacaaaacaaaacaaaaccaacaactcagaaggaggcatatgtgttataaagtctttactacaactttgattttattagtggttggttactgactctgccaagagtacagaatgaagggcagagagtaaggactggaaaactggcaggaaacacactgacagccgtcatccctggaggaaactgctcaataaaacggctccatatttacttctctggtcacggttcatactccacgattttaacaaaggagtcgaggaagctagatactgtaagtggaacggtgtgtctctggaggtaagcaggcttgctgatttcttgttttataattcttttttaattacaatgtaactactaagagcttcagttcccactggagtggtgcacacatctcattactactaaaaccacaggaatgttccagggaaacagactatcatcactgagcgaggtggaatccagccaaaaccccaggctaacatccagatgcctgcagatcagctaaaatccttttaaaggacttggaatctccagatactagttttaagtcttttctgggaactgggagtttgtactggaggccacttaactatttcaaaaaatattcaccaaaataggtgtctctctgactgcaacggtttgagtcctcctcagccctcatatcctaggcttcggactgttgggaaagtcttatcttcctgacgaaagctcagcagcaacagaacctgttatttttttgttgagacagggtcttactctgtcacccaggctggagtgcagtagtgcgatcttggctcactgcagcctcagcctaccaggctcaggtgaccctatctcagcttctcgagtaggtgggactacaggcatgtgccaccatgctcggtgaactaaaaaaacttttttgtagtgatacggtctcactatattgcccaggctggttttgaactcctgggctcaagtgatcctcccacctcagcgtctcaaagtactgggattacaggtgtgagcctctacactgggcctgcagaacctacacagaatccgcacctggtctgcagaacccacacccgacccacagaacccacacccgacccacagaacccacatctggcagcagaacctcttaatattttttttttttctttgagatggagtctggctctgtcacccaggctggagtgcagtggcgcgatctcggctcactgcaagctcttcctcccgggttcaccccattctcctgcctcaacctcccgagtagctgtgaatacaggcgtccgccaccacgcccgactaatttttttgtatttttagtagagacggggtttcaccgtgttagccaggatggtctggatctcctgacctcgtgatctgcctgcctcggcctcccaaagtgctgggattacaggcttgagccaccgcacccggcctcttatttttttttttgagatggagtctcacactgtcacctgggctggagtgcagtggagcgatctcggctcactgcaacctccgcctcctgggttcaagagattctcctgcctcagcctcccaagtagctgggattacaggtgcccaccaccacgcctggctagttttttgtatttttagtaaagatggggtttcaccatgttggccaggctggtcttgaactcctgacatcaggtgatccgcccaccttagcctcccaaagtgctgggattacaggcgtgagccaccatacctggccagcaaaacctctttaacttgtgttccatgggctccttttctgtgggtcaaaatcctcctggaaccctacaatgcaggccctacaggggtgggtggtaagtccaacaaacaggatttcatcttctggagctcctggatttcatcgtcccatgggccacagtgcagcgacagaacctcctcagctttctgtattgtgctcagggcttcgggtactgcaaacctgagccaagggaggtaagaggagttagttcactgatttgtgaggcaaatgttaattgagggcctactcacacaccgtgaagaatgtaagatcatttctgtcatcaaggatcctacaatctagaacagtaagtaagacactgtcacaaacacgctgcaaaacaaaagtgtgagaaaacagttataaaagatagtatagacgccaggatcctgagaacacgaggcaaatctcaaagcttttttttttttttttgagacaagagtttcactcttgtcgcccaggtatttgtgcgacctcggctcactgcaacctccgcctcccgggttcaagtgattctcctgcctcaacctcctgggcagctggattacaggcgtgagctaccacacccggcctcaaagttttcatctggtatttaccacaggtttacatagcagttttcattttagggtgaccatcttagggctgacctctgacctaactctgcagcccttttctctctctctgaccaaacagaatgtctctgtgtcttgggtaccaggcccactcagcacagccttaggttgaagctttaagcactttctcatagccacatacaccaagggcagctttaccagggttggaggttccacccggaaatcctgaaattgggccctaaatggtctcagtagcaaaagtggatttggcatcagctcatcagcgtgctgttctttccttttaaccttcaaagtagaacaggggatttaaaacaaaaaacaaacaacagcagcaaaaaagcagggtttctcgaccctgacactattgacactgttgctggctccttctttgctggggttggtggggggggcactgtcttgtacccgggaggatgcttagcagcacctctggcctctttcgaatagatgccagcagcaccccccttccaagtcatgacaatccaaaatgtctccagagatcgcttgagcccaggagttgcaggaagcagtgagctgtgaccgagccactgtactccagcctgggcaagacagcaagaccccttctcaaaaaaaaaaaaaaaaaagtctccaggcaatgccacatgttgtctgggggtaaaatcagccctggttcaagcaaacgctttaaaaggaagaggatgcagagtagggagaaggcagagagcctggagctgagagtgctgggaatgagacagccaaaggggctgtgacgaaccagagaacaaccagaaggagagctatactggagggtgggtggggctgcctggccaagttctctctgggaaactcacttgagatctaaaagctttccccatatctcccaggaggaaattctttttttttttttttttgagatggagtctcgctctgtcgcccaggctacagtgcagtggcgcgatcttggctcactgcaagctccgcctcccaggaggaaattctaaagcgttatgtttgttagcaaaacagaaggcaaagatctctcctaaagaggaaataaagaagtttcaacatgcttttaaaaacaccatagaaaaaaagtaatacccagaagagcctaggaaaggaacagtgtgtgccctgtgaagtgggaaagggactcacccgttgaaaaagatctgggccaatttgaagagctcatggcccatttcaacactggacggcccgtggcgaacctccaccacgtagagactcctctgtagatgggtggctgacttttgccagtctcctgtgagaagagaaaaatcttgttccagaaaagaaccactgtcaactgtggatgcatattttcagggggaggaaatggaacgagagggggagcaccctcagtttacagagcggggggtaaccaggcagacaaggccggggccacggcgaagtgcccacagcagactgttcccgacgcagaacgtgaaggctcatgctgtacctaaggcagcacaggcccgggccaggccatccgcgatctctcccaccacggcgtgctctgcccacaggaagctctcggcgtcacgctggcaccccgacagccgctgaacagctcgctctgtcaatgcagaggaaagacgtctcactatagacagaagcccagtcctaggaatgagaatccaggtctcaaatcctctgaatcagctgggctgaatgtggaaattccccctggcctccctgggttgtcaccaacgcacaatgtctgttccaataaagctgctgttttcttctgttttctctgtcagtggagaaaggcgctaggggaggcctccccacatttacactgtattttcaacattaacttcccaactcgaccaactctacctttcacgtacggccatgatttctcttgaccctgaaatctaagctaaaggtcaactttcataaagcagggtaaataaaaatcccatgatgtcaagctctaaggcagggttttcaagggcaatggggagctccgcaagtctcagacaaaagcaagacactcctatcagctgggctcacgccccactgctctctagcagagactagctctgaggagggaagaaccgcccttctaggaagttacatcactaggccctggaattaaaataaatgacactcaacttctggaactgcacacagctcacggatgtcagcgatgacccgttagttggcaggggtacttcaacttagcaatcagatgcagaagaaaacaacagctgaaatcacctggccccttttcaagggccccacagtaacaaagctggtcagggtttggactcactggcctatatagccatcttgtggctggcatggggataattacatccaattctcccatcagtactgagtatccctgagtccaaaacggtatcagaacaaataaaagggaaggggctggaggaccaaagcagggagccagtctcacctagttcaccatctctgagaagcttctgggccactctgacctgctgctgtaggtcctgtaaccgagagaccaggtggtccctgctgacggcggattctgcacaagatctgctgccacagcgcagcacgtcatctccctgtggaagtcagttttctctttattccaatgccagggtcagttatcaacaccgcctgtgcttacattacaggactgctccatagtttcttacctcatgggggaaagagactcctgtaacaatacatcgtgacgaaagtctgagcgaattttgtttgatggcggcaatggcggcaattctaatgaagtgtatcagcagtagctgatcccacctgagatttcatttttggaacagaactggtacagtgcacaatttctttccacttctatagcccctcttgtcgctttttggggccaggactttagatgacaaacatttcttttttttgagatggagtctcgctcggtctccaggctggagtgcagtggtgcgatctcggctcactccaagctccgcctcccgggttcacgccattctcctgcctcagtctcccgagtagctgggactacaggtgcccaccaccaagcccggctaaatttttgtgtgtgttatttattttttttttttagtagagacggggtttcaccgtgtaagccaggatggtctcgattttctgacctcatgatccgctcgcctcagcctcccaaagtgctgggattacaggcgtgagccaccgtgcccggccttgatgacaaacatttctagtagttatgaaaaagtcctcagaaaaccaatagaaggccaggtgcggtggctcacgcctgtaatcccagcactttgggagggcgaggcgggtggatccatgaggtcaggagatcgagaccatcctggctaacacggtgaaaccccgtctctactaaaaatacaaaaaattagccgggcatggtggtggcgggcgcctgtagtctcacctactcgggaggctgaggcaggagaatggcgtgaacccgggaggtggagcttgcagtgagccgagattgcaccactgcactccagcctgggtgacatgagagagactctgtctcacaaaagaaaaagaaaaaaaaaaaaaaaagaaaaccaatagaaaggctgggcgtggtggctcacgcctgtaatcccagcgctttgggtggtcgaggcaggtaggtcgcttgaggccaggagatcgagaccagcctggccaacatggagaacatggccaactcgtctctactaaaaatacaaagattagctgggcatggtggtgcatgcctgtaatcccagctactggggaggctgaggcaggagaattgcttgagtctgggaggttgaggctgtggtaagcagagatcgtgccactgcactcacttcagcctggatgacagggcaagaccccatctcaaaaaaaaaaaagaaaaaaaaaaaaactaatagaaaaaggtgctaggtgcgatcgtcctacatttgaccttgggtctccaagtttagctttctaacacaaccggctctgcctttcactcatgactcccctaagaagaatacggcacttgtggcagaggggaaacctccgaggtggacatctgctgtgtttcaaaggccgatatctattttctcatttggcaacagcaacccaacccagtttctcataaggatccctctcaccctcagtcccatggcccttgccctacagctgagggtgtggcatgtggctcacatatggctccttcctctggcccaaatggctggaggaaaactatgtctaattttcctccagccacagttctcaggtcaatgaaacacagtaacatctctgcccaggctgctgtttgagtggcatgtgctcttatcctccttggcaggaaatccgcaggctgggctgctggcagccatcctgcatcgtaagagggaagtctatctgaggatgggctaacacagagaaaatgaagctgagaggggtggacagaaagcccctggatcaagctgtatcttaagcagccttatcctggaatttttctcataacattttttttggtagagacagggtcttgctatgttgcccaggctggtcttgaacccctggcctccaagtgatctgtccacctcagcctcccaaagtgctgggataataggcatgtgtcactgtgcccagcctatcctgggacttttcaatgactgacttcagcaaataaattcccagtctcccccagatcccaaaccagttcagatgggatcttctgtcctttataaaggaaacattactaaattgaacctttccctgtggtttctctggaggggaactagtgtatggggatgactggctaaaatggaggtgatattactggtctcagcacttacaagtccctgatggcttcctcctaaacactgatcacccttggggtggaaaactgacctccaggaaaagtggaggagacagaagagagaattacctgcatgggcgctccgcaactgttgcaacagaatgcttcccacctgggccctgcagccatcctgtgtgcctcagtttgacaagctggacaggcgcagtcaaagaaatactgagacctcagcttctgctgcctttcggcaacccccatccggctcttgtgaggccctggagggagatcaccgtcagccaatattgaaagcaagagagagtcaaacactacgtaaaaaccttcagcttagcagagggtctggacaattacctatcatgtgacagctaacctttacccaaatatttgtggaactggatactaaaataagcttccaagttgctgagacaggaagaaagagaagccaagaagttgttcctagcccattttcagaataggaagtttatagtgattaaacagcgagacatagtttagccgcaatagggccctagcacgaaggccattccttccatcctcccttccttgtttttggcctaagtgttcactgcctcttccaggaagcagacagtagacaggtgaagtcacatgcctggtggcttgctgacttgcgtccccgtccttttctgttggagaagggcaggatggcagtgcggagggatggctcaccatagcagtggagaatctcttgcccctttctaatccgctgtgacgcccggatggtggcgacagtgctaatgaaggacacgctggtgttggggctacaggagtggttcaggaggctgataacagggaagatgcctgtggcaaggcgcacctgcctgctgtcggtaacgatgctccctttaggtcctgaaagggcaagaggaaagaaggaaaaaggtgtcagcacatgagccctggccttgccctctgttcctcagaagatgagctgggcagctaggcctgcagcccgtgtgagtcatggctccacagccagatccaatataaatcagatgggacatgactcacggcaagctccagtccccaggaagcaaagtggatgaacgcacacaaagtccactggagtcctggaacctaacgactgtgtctctacaccacgaaatagccaaagataagaacttataaagaagtaataaaaaagggatgataagtagggagcgttctagatagtttcataatgttctcacatagaaaccagagcccctgttgaggtgacttcccaaagacttttagagcccaagggcttttgtttatctggtctttggttggttaacagaacaagcgacctagttactaccccaaactttatatatttaagcaggccaggcaccagggctcctgcctgaaatcccgaggctcacgcagaagaattgcttgagcccaggagttcaaggccagcctggacaacacagctagatttggtctctaaaaaaaaaaaattaaaatattagccagctgtggtggtgcacacctgtagtcccagctactcaggaggctgaggtgggaggatcagttgagccctagagagcgaggctgcagtgagccaggattgcaccactgcactccagcctgggtgacagagcaggccctgtctgaagaaaaataaataaaaatttaaaaaaagttttactctaattgtaacatttattatttttttcttttttggtcttttcaggcccatagtttactttaaaattttgttcattttggccgggcgcggtggctcacgcctgtaatcccagtactttgggaggccgaggcgggcagatcacaaggtcaggagatcgagaccatcctgactaacacggtgaaatcccgtctctactaaaaacacaaaaaattagctgggtgtggtggtacgtgcctgtagtcccagctactcaggaggctgaggcaggagaatcgcttgaacccctgaggacgttgcagtgagccaagatcgtgctgctgcactccagcctagacaacaagagtgagaccccgcctccaaaaaaaaaaaaatttgttcatttcagaaaagaaagcatggtggataattagcactttaaaagtccacctgtaacacttcacttagccagaggctctacctgtgctggcttttctcaaagccatctgtcctaggagtatgtacagtaaagataaccttgggcacacagaaacgcttaaattatcttcagtagtctcaatttaagcatgaggcaaattgtgtttctaacaaaacaggttggaagataaaaaataccagtatttaaaaggaaacattcagttttctggaaaactggaaaaaaaccatcaaataactgtgatatcaccgaatatatgccaggaatctcaaaaaaaccactcaccaggctgggcatggtggctcatgcctgtaatcccagcactttgggaggccgaggcgggtggatcacctgaggtcagaagttcgagagtagcctggccaaaatggcaaaaccctgtctctactaaaaacacaaaaattagctgggcatggtggcatgcgcctgtagtcccagctactcgggaggcgaggtacgagaattgcttgaatccaggaggaggaggttgcagtgagcccagatcacactgctgcactccagcctgggtgacagagcaaaactgtctcgcaaaacaaaaaaaacaaattcaccaaagaaatagtctaggtacaaatgtaatggataaagaaaatattatgaaccattatgtgaaaatgttttataggccaggtgcagaggctcacgcctgtaatcccagcactttgggaggccaaggcgggcagatcacttgaggtcaggagttcaacaccagcttggccaacatggtgaaccctcgtctctaccaaaaatataaaaacttagctgagcgtggtggcgtgcaccagtaatccctgctactcgggaggctgaagcaggagaatcgcttgaaactgggaggtggaggttgcagtgagccgagatcgcaccactgcactccagcctgggtgaaagagcgagactctgtctcaaaaaaaaaaaaaaagttttataaaggaaaacactgaatataggaataatgttgtcaattttgttgtcaattttactatctgttgctaaggagaacaagaatagaacaagtaaatacattttgcagggaatccaaatgactcaattctagttaataattctacaaattgtattaaaatctttcatcagagcttctcctaagtgcttcgctgatttttgtttcttcttctcccccttgtccggtgcccaccttctggtatatgtgctaatgagcagtgaaaatgctaaaaggcaggtggcaggaaggagccgtccagggcatgaacaatttgtcgtctgaataatcagcctctgcataattaaaagtggacttgcattgccaactactgataactggcaatctatattagaaccattgctaaaattttccagaaaagaatgatcacactacagtgagtaatgtcagctttgtgaattatttatagattaccctctgacagaagtaggcccaggaaccgtgtgggtatttatgtcagagttgaatagctctctaattatttctaaaaaattaagtattgatttttaaaaattactcagtattgtgcattaatcatctattagtagagataatagaaagtgagaatatgtatgtagttcctcaaccaaatttaatctgtgacattttgtattaaaataaagagggagtgattctataccaaaacagtaccttgctaatatccctagtgcatttctttttatttatttatttttcagatgtagtctcactctgtcgcctaggctggaatgcagtggcatgatctcatctcactgcaacctccgcctcctgggttcaagcgattctcctgcctcagcctcctgagtagctgggattacaggcgcccatcaccacactcagctcatttttgtatttttagtagaagacaggtttcagcatgttagtcaggctagtctcgaacttctgacctcgtgatccacccaccttggcctcccaaagtgctggctaagccatgcccatccctggtgcatttaaactgggattcaagtaaagaaaaaagattcatgccgggcgcggtggctcacgcctgtaatcccagcactttgggaggcccaggcgggtggatcacgaggtcaggagatcgagaccttcctggctaacacggcgaaaccccgtctctactaaaaatacaaaaaaattagccgggcatggtggtgggcgcctgtagtcccagctactcgggaggctgaggcaggagaacggagtgaacccgggaggtggagcttgcagtgagccgagatcgcgccactgcactccagcctgggctggcccgtctcaaaaaaaaaaaaaaaaaaaaaagatagattccttcaatgctgaagagtgaaagcaatgggcagtgaattgatgggaagtgacaggacacagaaccccaataaaatcttgttatgacaggaatccggatagatcataaatatgccattcccactgagacagaaccacacgtgtcacggtctagaaaatcatcagtggccagttctgtcccttgagataagccctagtgagaggtttctggggaactttgattaaacaggatttatgcaaagataataacatacatttttataggtttttgtcaaagtctatcctagttaacactttaatcctttgcctgtactactaatgaaacagctgctaatgaaattcaatgagaacactaaattgagagggattggaaccccaaagaaataataaaaagggatataacaagattagaaatatgagcagactaaaagaaaatgagatgaaatttaacaatgaaagtgaaccttgctggtgggcgcgtcagtggaactttcctggagggcaattttgcaagctgtatcaagtgccttaaaaatgttcatagaaaagtactcttatcatttgaattatctttattattaaaaaaactaactgaggctgggcgcagtggctcacgcctgtaatcccagcactttgggaggcagaggtgggaggatcgcttgagcccaggagtttgaggttacagtgagctacgatcgccccactgcactccagcctaagtgacagagtgagaccctgtctcaaaaacaaacaaaaaaccactaattgaaattacaaaaggaatacgtggtagtcagaaaaaaatttaaaaattgaacattacagagaaaatgacagttgcttgtaatgccatcaggcagatataacatgttatctttaaatcctaacctaaaatacattttttttttttttgagacggggtctcgctctgtcgcccaggctggagtgagtgcaggggcgcgatcgcggctcagtgcaagctccgcctcctgggttcacaccattctcctgcctcagcctccagagtagctgggactacaggcgcccgcaaccacgcccggctaattttttgtatttttagtagagacggggtttcacgttagccaggatggtctcgatctcctgacctcgtgatcctcccacctcggcctcctcaagtgctgagattacaggcttgagccaccacgcctggcctaaaatgcattttagaattaaaaatacaggtcgggcacggtggctcacccctgtaatcccagcactttgggaggccaaggtgggcggatcacgaggtcaggagatggagaccaccttgctaacacggtgaaaccctgtctctactaaacatacaaaagttagcccggtgtggtgcacacctgagcccagctacttgggtgcctgaggagggaggatcagttgaaccctggaggtcgaggcttcagtgagctgagatcacgccgctgcactccagcctgggcaacagacagaggccctgtctcaaaaaacaaaaacaaaaccagtaaaacaactctgctgccgtgacaggccaacaaaggtatctggttttaattactagagaggttagagagtgaccgtttttacttatcactatctacttcgatacagtgcttgctcacgtgtgctttcaacagctgtactgagatagaatccatctaccgtaaaattcacttaagtgtacgattcagtgcttttttggggggaaatttataagattgggcaaacagtaccacaacccggctttagattttcatcattatgcatgtttttatttttatcttgctattttttagacagggtctcactctgttgcaatggggtgatctcagctcacggcggcctcgacctcctgggcccgagccgctgtcccacctcagactcccgggtagctgagaccacaagcgcgcaccaccacactcagctaatttttgtatttttgtagacacagagtttagccatgttgccccgggtggtctctaactcgtgggctcaagtaatcctcctgcctcagccttccaaagtgctgggattataggtgtgagccactgtgcctggccgctatgcatatttttaaaagttgattttaagagctgtatagttgctagagatattccctcattttgtccatttacatctaatttttgtttatgaggtttttttggggggattgttaaaacaatgacaatttcacttgttcacaattctgtaccccggcagttttggctcagctgagtattttttttttttctgctggttttgcctggggctgactcacatgactgcctttctgtggcacctggtcttttatcctcaaggaagccagcccaggcttgttcacagggctacactatcactccaagacggtgacagtggaggcaattaaggcttagactcaaaagtcacatcaggtcacttctgtctattggtcaaagcaagttacagagctagcccagattcaaggagaggggaaaaaaatctccacttcttgacaagagaagcagcaatgtcaagctgcaaagaggcaacttatagggatgggagaaactgtggtcatgtttgcaaacagccttccccagaggctctgaggcttatccagtctcatcatgtccatgatgacactgagatacacagaggttcaggagattaggtcttctgcctctcagtgcagtgttttttttttgagaggaagtttcactcgttgcccaggctggggtgcagtggtgtgatctcggctcactgcaacctccacctcccagattcaagcgattctcctgccttggcctccctagtagctgggactacaggcatccaccaccacgcttggctaatttttgtgtatatatatatgtatatatatatatgtgtgtatatatatatgtatgtatatatatatgtgtgtatatatatgtgtatatatatgtgtatatatatatatatatatatatattttttttttttttttttttttgagatggagttttgctctgtcacccaggctggagtacagtggtgtgatcttggctcactgcaacctccgcctcccaggttcacgccagtctcctgcctcagcctcccaagtagctgggactacaggcgcccaccaccacaccaggctaattttttttttttttttgtatttttagtagagacggggtttcaccgtgttagccaggatggacacgatctcctgaccttgtgatccacccacctcagcctcccatagtgctgggattacaggcctgagccaacacgcccggccatcctttatcttcctaaccaattatggtgttcttggtatttggtacctaagtagttaaatctagctatcttttaattacctaaatttgacattctatagtattttaaaaagcctctcccaccctaagactacataaatgttcacttacctttaactagataattgatggtttaattctgaaatatttaagttgttaatgatttgaaaaagactctaatcctttttggggggctgtcatcagtttccagttgtttttcattttgtagctttaatgctcgtatgaaatctgacagtaccaagacctttcagttctcttaaaaaaaaaaaaaggctattctcacccatttattcaagatgaatttagaatgttgtcaagttcccagaaaaactcaactgtgattctgtttgaaatggtatgaaactgattaggttaatgcaggaaactcaaagttttcagtctttccattaagaacatggcatgtctctgtggttatcgaagccgtctttcatatccctccgaattaaaatacctttgcctttctgggagaaactcttcttggttatgtattattattccttcaataaactgctagatatgacactgcagtggtttatccagggtttctacatctacattcacaagtgagactggtctctagcttttatcaccggctttctaaaatgactgggaaagagttctaggtttccccacaggctggagcagtttacacagtatagaaacaggctgttctctgtttgttgttgttcccagtgggtggggtcttgctatgttgcccaggctggtctcgaactccagggctcaagtgttcctcctgcctcagccttctgtctgtctgtctggtctgtctatctgagagagacttgctctgtcgccctggctatctatctatctatctaatcatctatctatctatctaagagacttgctctgtcaccctggctgtagtacagtggcacgatctcagctctatctatctatctatctatctatctatctatctatctaatcatctatctatctatctaagagacttgctgtgtcaccctggctggagtacagtggcacgatctcagctcactgcaacctctaccttccaagttcaagcaattctcatgccttagcctcccgtgtagctgggattacaggcacctgccatcacgcacagctaatttttgtatttttaatagagacgggtttcaccatgttggccaggctggtctcgaactcctgacctcaggtgatccacctgccttggcctcccaaagtgctgggattacacgcatgagccactgtgcctggcccgtgagttttttttttttttttttaagtattttcctctagaattatgggaaaggtatacaatcattttaaaatttaatagtataatggtaccactgtgtgaataagtgtttttaatgttaaaaaatcagaaaagttcaaagaagaaagtagcaatcacctgtatttccactttcagaattaatcactgctcagattttggtatttttgcttctactgtttcttctatgtatatatttttaaaacattacataaacaataaattatgcataaaacattagaacctcatagataaagccgatgtctccaaaccactttccatgaccccaagtagccagtattacgatatgtatctattcttccagttttcattagccacagaataagcatgtatttttcttttttctttttgagacagggtctctctctgttgcccaggctctagtgcagtggcgcaactcatgtctcactgaagcctcgaactcttcggctcaagcaatcctcctgcctcagcttcccaagtagctgggaccacaggcacatgccaccatgcctggctgttttttttttttttttttgtagagatgggtcttgctctgttgcccaggatggtctcaaattcctgggctcaagcaatccgcccacctcagcctcccaaaatgctgaggttaaaggtgtgagccactgcggctggcttcaggtattcttttttttttgagatggagtctccctctgtcaccaggctggagtgcagtggcgtgatctcggctcactgtaacccccacctcccaggttcaagcaattctcctgcctcagcctcccaggtagctaggactacaggcgcccgctgccatgcccagctaatttttgtatttttagtagagatggggtttcaccacgttggccaggatggtcttgatctcttgacctcgagatccgcccgcctcggcctcccaaagtgctgggataataggtatgagccaccgcgcccagccctattaagtattttaaaggcaagacatggaatcaagagttggtaactttctgctatttaattgggaagccccatatatttttatgttcagaaaaacagaacaaagtaaagtatattaaaaaatacaagtgaatatacccaaaggagaacctaattctggaaaaatactcagcagctatattttagatggtagcaaaggcacaaagaagcaaaggagggcagaggaaaacacaggctaacctgacatgtgatttagtagtatcatgggaccaggccagtcctatttttagatgttccacgagcttcaggatggggaagagaatcttggccaaaacatgtctactgagatacctatataccatataacttgcctgctgaattaaaattaaacataaacatgcacaccaaaataggctgacaaattctagatgacctaatgtgagatcaaatgagctaagcatgtagagtttagtgaagccacatttaatattcatctgtctataaaaactcggtttagctaacacctggtttcctccctctcaagagagttaattgaaaaaattaagaaaagtataatgaacggattgagtcaaaaaacattttctgctaaaatgaagatcataaaatagaaagactacaaatgccacttttctaataatagttgtatctgttgtcagcacagtcacactggagatgtcaagctggatcatgattctcggcacatccaaccttcccatctatcttaagtagtgttatctataggctccagttcaggaaagcaggctgagccagctcgtctgtgtttagaggtggccccttgaggtttggccacctgatcaaaggacaggcactatgcaggctggcagcttctgctgcagtgtggggtggaaggctgcgctgggctggaaatttagaagaatgggaaatatctctcaattggaaagagaagacagagagtagctgattgagttaagggtctgatatctggccgggcacggtggctcacgcctgtaatcccagcactttgggaggccaaggtgggtggctcacctgaggtcaggagttcgagaccagcctggccaacatggtaaaaccccatctctactaaaaatacaaaaattagctgggcgtgggggtgcacgcctgtaatcccagttactcgggaggctggggcaggagaatcgcttgaacctggcagacagaggttgcagtgagccgagattgtgccaccgcactccagcctgggtgacagggcaacactccatctcagaaaaaaaaagaaaaaaaggactttgataccttacccaactactgggcctcttctttctgcagtctggtttgactattatttctgccctccctaaagagaaactatatagctttctctggaatcttgtgcatgtattttttttttttttctcttgagacagggtttcacccaggctggagtgcatcggtgcgatcatggctcactgcaacctctgcctcctgggctgaagtgattctcctgcctcagcctcccaagtggctgggattagaggcgtacctggctaatttttgtattttgtcatgctttccaggctagtcttgaactcttgagctcaagtaagtgatttgacccaccccggcctcccaaagtgctgggattacaggcgtactgtgtcaggccttttgtgtatgtaccttataagaaacttgctattactatttatttgagacagttttccttcataaccaaaaaaattcgggttgagtgcagtggttcacacctgtaatcccagcacttggggaggctgaggcgggaggattgcttgagcccaggagttcaagaccagcctgggccacatagcaagtcctcatctctattaaaaaaattttaaaaggccaggtgcagtggctcatgcctgtaatctcagcattttgggaggccaaagcaggtggatcacctgaagccaggagttcaagtcccacctggccaacatggcaaaaccccgtctctactaacaacacaaaaaaattagccaggcatggtggcgcatgcttgtaatctcagctacttgggaggctgagcatgagaatcatttgaacctgggaggtggaggctacagtgagctgagattgcgccactgcactccagcctgggaaagagcaagactctgtctcaaaaaaaaaataaataaataaagtaaaataaaaaataaattttttttcagcaatatggactttttaaagaatttcaaaagaatttttacaaacagccaggcacggtggctcatgcctataatcccagcactttgggaggctgaggcgggcggatcacgaggtcaggagatcgagaccatggtgaaaccccgtctctgctaaaaatacaaaaaattagccgggcgtggtggcgggcgcctgtagtcccagctactggggaggctgaggcaggagaatggcgtgaacctgggaggcagagcttgcagtgagctgagatcacgccactgcaccccagcctgggggtgacagagtgagactccgtctcaaaaaaaaaaaaagaatttttacaaacatagctttacacaactctgtaaagttagctgggataaaactacccattttacagatgagaaactgaggcagaacggaatcaaataattttttttttttttgagatggagtctcactctgtcgccaggctggagtgcagtggcacgatctcggctcatttgcaacctccacctcccgggttcaggtgattctcctgtcttagcctcccgagtagctgggactacaggcatgtaccaccatgcccagctaatttttttatttttatttttagtagagacggggtttcaccatgttggccaggatggtcttgatctctggaccttgtgatctgctcacctcggcctcccaaagtgctgggattataggagtgggccaccacgcctggcaggatcaaataatttaaggtcatatagcttcttaatggcattgtgacaataaacaagacagcttagtgatcccattagctcaatgatttgtttgaatcctattttcctttggaattgtttcttctcaaacacctgctccatcgagaacaatattgaaaagcaggaacatcaggttccctcttacctgtgtgttgtatggtggtcatcgcctgagcgttacactgaagctgtaacatgtgtctcagcatcgccactccccaaatagtcacgtcaggacacaattcaggtgtcactgctgctttaagctgagaggagttcacaatcctctcagttgggatggcctgtaaactggctgcttctagctgtctgcacagtgcagaaacacagagagcacagaggaatttgtgctctgggctatggttttcagtgtggggcaaaaggttgaagacagcattataattattttcatacttcccattaatatcgcatccaggaattggggtctcaacgatgttgccatttttctcactctcccctaggccataattaagtgtcttgacctgattgttgctttcaggtaaacagatgtccttgttactaatcttatcacaaagcttcgttatgattttgcgaacatcctcaaatcccaccaaaagagtcaacctcagggcaatgtggcaaaagacacccagtgtgagaagcagccctcccagaggacattctgtcctgtggtagagctcccaggcctgctgcaaacactcctggctgcaatacttggcataactgcatccgtcacacggaactgtggccaaagtgtgcttcaaacatcggtgacaatagaggtccccattggtgactctggtgtcccatttgctgtctaggccgtgatgcggtggtggcagttctcctgggttgagaacactcacaaaagcatcctcctgcaccaggagctctcctgggagaatatcttttgtggcaacgagacagcgaccttttaaaggatctacgcataagccgatggatgatgaggcattggaaagttgttcattctcctccctcagcgctgcatcctcaagggttttggccagagctgctgggaagctttctgtgagactgtccttttcttgcatcttcattttcagacgatggaggtttctctgcagagtctgagggaggacatctgctagggctggtgtggctgtgaagttcctttcaagatcactgatggtctggcttgcctcctgcagtctccccagggccaccagacattctgctttacgtaacataatcttgggttgcaacctttctggatacccatgtgtctgtgctctgttaatgtctttaagacacgtctgaaaacagaaagaaaatcccacaatgacccttggtccctattcttcaatgtttactgaaaatgtttccaaaaatctacaggaaagttaaggattattaaaaaatggaacaattacaaccacatgcttattaaaatcatatagttctgtgtgatcctttgagtgattagcaatacttgttgaggatattgttatgcttaatgtttttggattaaattttttctttttttttgagacggagtctcgctctgtcgcccaggctggattgcagtggtgcgaccttggctcactgcaagctccacctcctgggttcacgccattctcctgcctcagcctcctgagtagctgggactacaggtgcccgccaccacacccagctatttttttttgtatttttagtagagacggggttttgccatgttagccaggatggtttcgatctcctgacctcatgatacgcccgcctcagcctcccaaagtgctgggattacaggcatgagccactgcgcccagcccctggattaaatatttctattttttaaggaaaaagaagtcttatgaatagaagaattatagcatggtgactaacaggcaggctttgaaaaaaaaaaaaaaaaaaaaagaggcaggctttgagtccaagcagacctgcattcaaatacactctgctggccgggtgcggtggctcatgcctgtaaccccagcactttaggaggccgaggcgagcagatcacgaggtcaggtgatcgagaccatcctggctaacatggtgaaaccccatctctactaaaaacacaaaaaattagctgggcgtggtggtgggcgcctgtagtcccagctactcagcaggctgaggcaggagaaacgcttgaacctgggaggctgaggttgcagcgagccgagatcatgccactgaactccagcctgggtgacagagcgacactctgtctcaaaaacaaacaaacaaacaaaaaaccaaatacactctgcctcttactagccacatgaccttgtgcaatcgacttaatttctgtgtcttaattttatctaaaaaacagggataataatatctcccagtgttgttttaaggataaaaggaaataatatatctaacatgccaaaaggagcacctggaacacagtatgtgctcaataaatgataatcattattataagaaggaaaacatttgggcatggtggctcacgcctgtaatcccagcattatgggagaccgaggtgggcggatcacttgagtccaggagtttgagaccaacccggacaacacagatgagaccctgggctctataaaaaaattaaacaattagccaggcctggtggcacatacctgtagtcctagctactcatgagactaaagcaggaagactgcttgagcccaggagtttgagatcacagttagctatgatcgagtcactgcactccagcctgggtaacagagaccctgtctcaaaaataaaaaaaaataaagaaaaaggaaaacagaaacaatcaataaagaaaagttataaagggttcaatgtattgcaagttctttttcctaatcactggcctcagcagtccaggactttcttgtttagggtcaagggttagattcctgcttttctcttttagtctgaagggcagtaagtgtggacttcttactattccaatagttctcaaccctagggtataatttgaatttttgtagaatgttgaaacagatgtatcaaaatggcattttagagcttgtccttagacctctctaatacaaatgccagatgcctcagaggtatcctcctaaaacattaatccgattttggtcacttcctgttttaaaaactcaactgacacggctgggcgcagtggctcacgcctgtaatcccagcactttgggaggctgaggcgggaggatcacaaggtcaggagtttgagaccagcctgaccaacatggtgaaacgccatctctacttaaaattagccgggcgtggtggtgcacgcctgtagtcccagctactcagaggctgaggcaggagaatcgttgaacccgggaggcggaggttgcagtgagcagagatcacgccactgcactgacgcctgggcgacagagcgagacactgtctcaaaaaaacaaaacaaaacaaaacaaaaactccactgacaaagtcctcaactttttctctgttgcaacaattaggggatgagaagaatgtcattcacagaaagctgacctcacaggcagacacgggcagttcaaggtaggttttccttttgcactcacgacacttaagaaggctgagctattactacagggataatcttaaacacgctctacttatttaaagcagcaaacagtatactttgcaaacacttggaacctgaagtattagcagcaacatgtcacttggctgatcctgacactgaacactgctgacctcttggacagtccacatccccatggaatgtcccatagctcgctctttcctttctcttttgagacagagtcctgtcttacccaagctggagtgcagtggcacgatctcagctcactgactcactgcaacatctgcctcccaggttcaagagattctcctgcctcagcctcctgagtagctgggattacaggcgcccaccacccgcccagctgatttttgtatttttagtagagacggggtttcaccatgttggccaggctggtttcgaactcctgacctcaagtgatccgtctgccttggcctcccaaagtgctgggattacaggcgtgaaccaccatgcctggccccatagctctttcttgtcaatcaacactatcccatatggtcacctgtgatcagtgaaatgactcaggagaaagggcgagttcagttagttttttttttttttgagacagagtctgttgccaggctggagtgcagtggtgcgatctgggctcactgcaacctctgcctcctgggttcaagcaatactcctgcctcagccactgaagtagctgggactacaggtgcctgccaccatgcccagctcattttttgtatttttagtagagatggggtttcaccattttggccaggatggtcttgaactccagacctcatgatccgcctgcctcagcctcccaaagtgttgggattacaggcatgagccactgtgcctggcctagtacatttttttgagatagagtctcactctgtcacccaggctggagtgcagtggtgcgatctcggctcactgtaacctctacctcccgagttcgagtgattctcctgcctcagcctcctgagtagctgggactacagatgcatgctactacacccggctaatttttatccctgtatttttagtagagacagggttccactgtgtcggccacgctggtcttgaactcttgacctcaggtgatccgcccgccttgacctcccaaagtgctgagattacaggcaatgagcgcccagtccgactttaggtagatattaatgtgcttccaattcaaccaatagcagcatgacatgattttagtgttctatggaagaagcagagatgaaggtctagtcctccagtaagaagccctccggatcctgtcctctcataccaggtatcctgatactcacctcatactgacccaggtggaagagggctgccgagcggttagcatgacacagtgacatgtcctcagtgttaggccttgaatgtgacactccctgcaaaacaatgaactggttaaaagtataaatggacaccagcatctctgaagaacatttttcagatattccgggctctagtactgaagactgtgtgaaactgggaaagttactgaacctctttgtgcttcagcttatcttttaactacctgagagcaaagctgtgaagagcaagtgaggacatcagtattaaaagcactttgtcagatacagcttcaaccacaaacaatactgaaggtggataaaaaactgagggacatacctgcaagcataatatcctacaacctgaatataacaaagggtgggtggcacaaatagaaattcacaaaagaagaaacacaaatagttatagaaaacaaatgattaattcacatatggatagccaaatagatgaaaatgaacgcaaaaaagggatactaggctgggtgcagtggctcacgtctgtaattccagcactttgggaggctgaggcatgtggatcacttgaggccaggagttcgagaccagcctgaccaatatggcaaaaccccgtctctactaaaaatacaaaaaaatagcagggcatggtaatgtgcgcctgtaatcccagctacttgggaggctgaggcatgagaatggcttgaacctgggaggtggaggttaggttgcagtgagctgagatagtgcctgagtgacagagttggactgtcacaaacaaacaaaaaagaatacttttttctaccatcaaattggcaaggattaataataaccataaatatggtactcaagtaaatgtaggaaagatggtgattactcagtaaaactactgggatgagaccgggcatggtggctcatgcctgtaatcccagcactttgggaggtcaaggcaggtggatcacttgaggtgaggagtttgagacctgcctggctaacatggcaaaaccccatctctactaaaaatacaaaaattagccaggcatggtggcgcacgcctgtaatcccagttactcgggtgggtgaggcaggagaattgcttggactcaggaagcagaggttgcagggagctgagatcataccactgcactccagtctgggcagcagagtgagactctgtctcaaaaaaataaattaataataaaataataatatatatatatatgtataagtaggtagacaatgagcaaaataaagtgatgaatctttcattggataaattccaaatacatcaaattcttttttttttttttgagacggagtctcgctctgtcgcccaggctggagtgcagtggctcgatctcggctcactgcaacctccaactcccgggttcgcgccattctcctgcctcagtgcccccgagtagctgggactacaggcgcccgccaccacgcctggccaattttttgtattttttagtagagatggggtttcaccgtgttagccaggatggtctcgatctcgtgacctcgtgatccgctcgcctcggcctcccaacaaatacatgaaattctttaatgtaaaaacaaaactatagaagtgctggaagaactgtagaaagcatgtaaagtattgctggacgaatccctaactctgacacaaaacccagaagttatcaaaggttaataaactcgaccgcctgaaaataaaaactatcttcacaccaaaaaccaataaaagcagaaggcgaacactgaactggaaaaaatatctgcaatttatactataggcaaagagctaatttctttactttgtcaagatttcctacagatcactaagatgacaaccagtaaatcaacaggaaaataggcaatgatatggacaattctcacaggaaataaaaatggctactaaatatgtgaaaaaaaatgctcagcctcatacaatcaataaaatgcagattacaactgtacagaaatgccatttttttacctatcaggcaaagcaaaataaaattgatggcacacagagttggtcaagaagtgggatgatgggtatcctcattatgctgttagtgagggtgtacactggtttcataattatggagggcaatttagcaatatatgtcaaaattctatatgtatgtatatcttatatacatataaaatatccattgaccaggcaattcctcttctaggaattaatcctacagatacaatcacttatcctacagttatatatgaaaaatgacatacatacaagggtttttttcttttttttagacagagtctctcgttgtcgtccaggctggagtgcagtggggtgatctcagctcactgcaacctccgcctcccgggttcaagcgattctccagcctcagcctcccaagtagctagggttacaggcacacgccaccatgcccagcttattctgtatttttagtagagacagggtttcaccacgttggcaaggctggtcttgaactcctgacctcaggtgatccacccgtctcggtctcccaaagtgctgggattacaggtgtgagccactgtgcccggccctgtgcaaagtttctcatcatagacttgtttgaaacagcaaaagacaggaaacaagcatcgatccacaggacactggttacataaattgatacatccatttaatggaacgccatgtagccatcataaagaatgaggatgctttttttttttttgagacagagtttcgctctttcgcccaggctggagtgaagtggcgtgttcttggctcactaaaacttccgcgtaccgccccccccggcccccacaccggcaaccccgcaccagggttcaagcgattctcctgtctcagcctcctgagtagctgggagtataggcgcaggccccaccacgcccagctaatttttctattttcagtagagacagggtttcgcccttttggccaggctggtcttcaacttccaacctcaggtgatccacctgcctcagcctcccaaagtgctaggattacaggtgcgagccaccgcgcccggcctgaggacgctctttatgtactgaaatggaatgacctttaaattattactgttaagtggaaaaggcatggtgctgaacaatatgcgcagaatgttactgatgtaaaaacacggtgtgtgtgcaggagtggaaggctgtatttacacacgcctggagtatgctctggaaatatactcaacagtgctagtttatgggaacagaaaatcatgtggtcaggggacaggagaggcagatgacgctggacactcttgcacttttaaaatctacatgaacagattccctcctcacaaataaatcgatataataataaaaccgtaatcatcacaaccagtactgcttgggatatggagaaattaatatccccatagtctgccagaggggatgttaactagttctttcctggagaacaattcagcatcaaataccaaagaccttaaaaaatacattccttctgccccagcaattacccttctaggaatttatcctaagcaagcaatcagatatatacacatatttacatagaaagatgctcattgcagtattatgatcccgaacaatttgccaacattaggagatgtgaaatcaagtacggttttttctctgtcatggaacactaagccagccgtaaagaaccatgttccagtggaaaatttaataacatgagaaaatgggcacaatcaattgtcgaaggaaaaaagcaggtcacaaaagagaaagtgcagcattatcccaattttgtaaaagaaaaacgtattttcggaggaaaaagtctggctggatggacgtaagcaaaaatgttaacagtgcctatcactggttatgaggtttttttttactctttatgctcctctgtactttccgaagtaaacatatattacttttacaatcagacaaaaacaacaaatatttttaaaaagaaagaaaatagcagctttctagaaaattgcagagtaccataatcaccaacatactggcttcatgaaataggaaggctcatctccctccacattcagagcaaaccttaattttttctctggcttcagtttttattttccctgttttccttgaagaacttcccatgtgatcacatttatgatgcacatacataaagttgaagagattagctctgaaaaaagaactattaagccatttatcactggatcattacacctaatggactttaatccctcagcaaccactaaagcttacattatttagctaaatactttattacaacactacaaagcagggattttatcagctgtagaagctgctgttgtaggtgtgatcgtttttggaaaattaatcccaaacttcaagcacgttcaagcataaacctgttaaagattcagagtaggatgtacacccttcaaatgaaaaacaaattttgtttttaacagagacagggcctcgctgtgttgcctaggcctgtcttgaactcctgggctcaggcaatcctcccgcctcggtctcccaaagtgttggaattacacgagtgagccactgtgcccagcctacccttcaaatttaaacttattcttttaatatccaaggtcacagaactggtgcaagagattgtcatactcctgctttaagcccatataagtatcttaaaagctacggaaggaagttgctcaggggatcttgttccagttcttactatgaaagcaggacaataagagtcatttatacattattattattgttattattattattatttttttttttgagacagagtcttgctctgtcgcccaggctggagtgcagtggtgcgatctcggctcactgcaacctctgcctcccgggttcaagcaattctcctgcctcagcctcctgagtagctgagattacaggcgcccgccaccacgcccagctaatttttttgtatttttagtagagacggggtttcaccatgttggtcaggctggtctcaaacccctgaccttgtgatccacccgcctcggcctcccaaagtgctgggattataggcgtgagccaccgcgcccggcctattattattgttttgagacagtctcgctctgtcgcccaggctggagtgcagtggcgcgatctcggctcactgcaagctccgcctcccgggttcacgccattctcctgcctcagcctcctgagtaggtgggactacaggcgcccgccaccgtgcccggctaattttttgtatttttagtagagatggggtttcaccatgttagccaggacggtctcaatctcctgatccacccacctcggcctcccaaaatgctgggattacaggtgtgagccactgtgtccggcccatttatacgttattttacagatggggtcttgctatgttgcccaggctggtcttgaactcctgggcttaaacaatcctcctgcctcagcctcccaaagggctgggattacaagtgtgagccactgtgcccagccaagaataatagattactaattctatcaagctaacagtctcatcagacattcagacaaaaatggcatgtagttcaacaagggctgacagacatgggcaaggcaggcgaggggcccataagcttactgctacagggtatcggaaggaatatggaaatagaagtttcttgaagaaattcagaacacataaattacttttttttttttgagtcagggtctcactctgtcacccagggtagtgcagagaccagcctggccaacatggcgaaaacccatctctactaaaaatacaaaaattagctgggcgtggtgccgcatacctgtaatcccagctactcaggagactaaggtgggaggatcgcttgaacccgggaggcaaatgttgcagtgatcacagctcactgaagcctggaactcccgggctcagtgaccctcctgcctcagcctcctgactggctgggactgatatgggaggggggcagggaactgctgtgtagagaaaggcgggtccctgggtagggcttcacccttgggcctgtgtccactgacccaggtgaggacaagcactcccgccttcgcgcccaaatgttgcattttccaagaccaccctggtttgccacgccccccagcctgggcctataaaaacccaagaccctagcaggcagacacataagcagctggatgttgtcaggagtatgccggcggaagagcagccgacaggcatcggcatgccatcgaccagtgcagaaggacacggactttggccagagcagctggtaaagaggtgggcctctgagtggcctgactccaggggaaaaccatctcccttctggctcccaacctgctgagagctacttctactcaataaaaccttgcactcattcttaaagcccacgtgtgatccgattcttccagcacaccaaggcaagaacccgggatacaggaagccctctgtccttgcgacaaggtggagagtttaactgagctggttaacacaagccgcgtatagacagcaaactaaaagagcaccctgtaacacacgcccactggggcttcaactgtaaacattcatccctagacactgccctggggtcggagccccgcagcctgcccatctatatgctcccctagaggtttgagtagcagggcacggaggaagcgagccacacctccatcgcacgccctgcgaggggaacaagggaactttttccgtttcaggaccacagatgcatgccaccactagtcaggctaatttaaaaaaaatttgtgtgtgtggagaaggggtctccctatattgtccaggctggtcttgaacccctggcctcaagtgatcctcccgactcagcctcccaaagggctgggattacgggtgtgaaccactgtgctgggcctaaaaactaccttttgtttcagactataaccacagcagaattccgccaggtttctttttcaaatccattcaataaattatagacaaagataacactggctatacaatttagcaatatgggtccatctcctgaagaaacacgcattgttacattgctgggctgggcagggcatggtggctcatgcctgtaatcccagcactttgggaggctgaggcgggcgcaacacctgaggtcagtagtttgagaccagcctggccaacatggcgaaaacccatctctactaaaaatacaaaaattagctgggcgtggtgccacatgcctgtaatcccagctactcaggagactaaggtgggaggatcgcttgaacccaggaggcgaatgttgcagtgagctgagattataccactgtactccagcctgggtaacacagcaagattctgtctcagagaaaaataaataataaattgcttgagctgggagtgttttaccttagagtacagcactgcagctcctgtgtaatctttctcctgaaattttttgtttccttcttctctgtagaaaagaggagcgtccgagtcctttcccaccaagtaacctttagaaagtctttttagaaacagctcatcctcaggtctgcatgaagaaaggaggaaacaaagtaagcagaaatgtgttatttcaaggaaagctctaaaccattgccctcaaaacaagaaagtgggcccgcaaaacatttcacacacatgaggatatgtacattgtgcaatgtgattagaggaaagaaatctcatagtctcagagacacagggaccagaattttttgagacagggtctcactctgtcacccaggctggagtgccgtggtgccatctccactcactgcagccttgacttcccaggctcagatgattctcccacctcagcctcctgagtagctggcactaattgggaggatgtgtgccaccaggcctggctaatgtttgtacttttagtagaggtggggttttgccatgttgcccaggctggtcttgaactcctgggctcaaatgatcagcagaatttctttttttttttttttttttttttgagatggagtctcactgtcacccaggctggagtgcagaatcatgatctcggctcgctgcaacctccgcctccctggttcaagtgattctcctgcctcagcctcctgaataggtgggattacaggcgcccatcaccaggcccagctaatttttgtatttttagtagagaaagcatttcaccatgttagccaggctggtctcgaactcctgacctcaaatggtccacctgcctcaccctcccaaagtgctgggaatacaggcgtgagccaccgcacctggccagaatttctatttagaggactgaaggctaattttttattctttatctcataattattggccaacgaaccatccctcggatcatacatcataaaagattttttttttttgagacagagtttcgctctgtcacccaggctggagtgcagtggtgcaatctcagctcactgcaaactctgtctcctgggttcaagtgattctcctgcctcaccctcccgagtagcggggattacaggcatgcaccaccacgttcagccaatttttgtattttcagtacaggcagggtttcaccattttggccaggtttgtcttgaactcctgacctcaagtgatccgcctgcctgggcctcccaaagtgttgggattacaggcatgtgctactgggcccagccaggatcttgagtctggaaaatgagactaatatatggtgtcttttgaatcaaggagtattctccacttcaactgctgaaaatacttgagtggctgacagaagagagataatgagaatgaatcataaagtaaatgtagtaaaacgttaacacttgcgaaatttggaagaattcaccaattctttgtacttttttttttggagacagagtctcactttgttgcccaggctgtagtgcagcactggcacgatctcggctcactgcaacctccgcctcctgggtgcaagtgattcttgtgcctcagcctcaggagtagctaggagtgtgagccaccacgcccagctaattttttgtatatttagtagagatggggtctcatcatgttgccgaggccggtcttgaacttctgagctcaggcaatctgcccactttggcctcccaaagtgctagatcacaggtgtgagccactgtgcctggcctctttatactatttttgcaagtaagtctgaaattatttcaaactaagaagtttaagaaataaatatacaaatgctctacaaaattaataaagctgaactaatacataaatatagagacatatacacatactaacaaaaaatatacctattttccaataaaaagaaataatatagaataacctagactattctctttgactataatgccataaagtaaaatatgaataacaaaagtagaaacacaaatgacatggaaactaaaaattatcttaagtaactcttgaatcaaagaagaaatcacagagctgcagaatggccaggtgcggtggctcacgcctgtaattccagcactttgggaggccaaagagggaagattgcctgagctcaggaggctagcctgggcaacatgggaagaccctgtctctacaaaaaatacaaaaattagctgggtgcggtggcatatgcctgtagtcccagctactcgggaggctgaggtgggaggactgcctgagcccaggaagtcaaggctgcagtgagccaggagggccccactgcattcaagcctgggtgacagggcaaggccctgtctcaaaaaaacaaaaaacaacaacaaaaagccctggagaatgtttacaagtaagttaaaaatttttgtttacaaagacccacaataaggaacacctttcacattgtgactcagtataatgcttttgtgtttgaatctattaacattttataaaacattatctttgctatgaggtaaaaacaaagttagtatcaaatatgattttattaatatttaaatacaacacagacaagtcacaaatagggctgggtgcagtggcttatacctgtaatcccagcactctgggaggccgaggtgggcaggtcacctggtccacgagtttgcgaccagcctgggcaacatagtggaacccacctccacaaaaaatacaaaaattagccgggcgtggtggcaagcacttgtagtctcagctattgggaggccgaggcacgagaatcgcttgagcctgggaggtgaaggttgcagtgagctgagatcgcaccatcacactccaacctgggtcaaataatacaaaaaagaaaaactaggaaagattttatttaatttaagaggtgtgcttgcctgttctacatttactccagtccagaaaatatgaaggcaataccctatgcctgtctggtacaccgcagagcttgttcttttttctgtttttgttttaaattaggttaaacctaaaaaccctagttcaaacaaaaggtttgtggtaaacagtaataatagcaaaattcttcttgcctaacaatagattatgaactcaatgtctttttttttttctttttttgagatggagtctcactctgtcacccaggctggagtgcagtggtgcgatctcggctcactgcaacatctgccttccgggttcaagtgattctcctgcctcagcctcctgagcagctgggattacaggtgcccgccaccacacccagctaatttttgtatttttagtagagacggggtttcaccatgttgatcaggcaggtctccaactcctaacctcatgatccacccgccttggcctcccaaagtgctgggattacaggtgttgagtcactgtgcccagaatacttttttgattttttagtagagatgatgtctcaataccttgcccaggctgttctcaaactcctgagctcaagtgattttcctgccttggcctcccaaagtgttaggattacaggtgtgagtcactgcatccagccgattcttttttttttttttttaatgtcttctggaatattatgataaaaaaattgaggctgaggtgggaggatcgcttgagcccagaaggtcagggctacagtgagctacgatcacaccactgcactccagcccagtcagcacagcaagaccctgccttaaaaaaaaaaaaaaaattgaggtagtaagatggaaaaagcaatctaatgtttttttttttgagacgaagtctcgctctgtcaccgaggctggagtgcaatggtgtgatctcggctcactgcaatctccgcctcccgggttcaagcgattctcctgcctcagcctcccgagtagctgggattacaggcacctgccaccatgaccagctaatttttgtctttttaggagagacggggtttcaccatgttggccacactggtcttgaactcctgacctcaggtgatccgcccgccttggcctcccaaagtgctggaatgacaggtgtgagccaccatgcccggcctatttaaaccattttttaagcatacagttcactggcattacatacattcatattatccaaccatcagcactattcatttccaaagttttttcatcatcccatgctgaaactctacccattaaaccataactcctcattcctccctctccacatcccctggcaaactccattctgctttctgcctctgtgaatttacttattccaggtatttcatgtaaatgtaatcatacattacttttccttttgtgtctaacttatttcacttagcaaaaagttttcaaggtacatcatgttgtagtataaaccagaattttgcttatttaaaaaaatttttttttggccaggcgcggtggctcacgcctgtaatcccagcactttgggaggccgaggcgggtggatcacgaggtcaggagattgagaccgtcctggctaacaaggtgaaacccccgtctctaccaaaaatacaaaaaagtagccaggtgtggtggtgcgtgtgtgtaatcccagctactcgggggactgaggcaagagaatcacttgaacccaggaggcggaggttgcagtgagccgagagcacaccacggcactccaccctgggcgacaaagcgagactctgtctcaaaaaaaaaaaaaatttttttttaagagatggagtctccctttgtcgcccaggctggagggcagtagctattctgcactctaacctgggcaacaggcacagtctagctacaggcacaatgatcgcacactatggcctttttgtaggtgtgtgaagtgatctctcactgtggttttggtgtgtgtttctctgattatgaatgatgttgaacatcttttcgtgtgtctactggctatttgtgtatcttctttggagaaatgagtcaagtcctttgcctatttttaatctgatttttttgttattgagttgtaggagttctttatatatttcggatattaatttcttatctgatacatgatttgcaaatagtttctcccattctgtgggttatcctttcactctcttgatactgtccttggtgcacaaaaccttttttttttttttttaagacagtctcactctgtcgcccaggcagaagttcagtttctcggccactgcaacctccgcctcccgggttcaagtgattctcctgcctcagcctcccgagtagccgggattacaggcacgcaccaccacgcctggctaatttttgtatttttagtagagacagggtttcaccatgttggccaggctggtctcaaactccaggcctcaactgatttgcctacctcagcctcccaaagtgctgggattacaggcgtgagccaccgcgcctggcctaaaactgtttttttttgagacaaggtcttgctctgtcgcccaggctggagtgtagttggcttggtcatggctcactccagccttgactgacctcccaggctcaagtaatcctcccacctcagcttcctgagtagctggggctccaggcatgcgccaccatgcctggctatattatttgtagagacggggtctcacttgttgcccaggctggtctcgaactcctgggctcaagtgatccttccgccttggcctctcaaaagagtggtgggattacagctgtgagccaccatgcccagcctaaaagttttaattttgataaagtacagtttattttttttgttgttgcctgtgcttttggtgtcatatgcaagaaataactgctaaatccaatgtcaagattttcccctatgttttcttttaagaagtttacaattggccgggcacagtggatcacgccccagaactttgggaggccgaggtgggcggatcacgaggtcaggagattgagaccatcctggctaacatggtgaaaccccgtctctactaaaaatacaaaaaattagccaggcgtggtggcgggtgcctgtagtcccagctactcgggaggctgaggcaggagaatggcgtgaacccgggaggcggagcttgcagtgagccgagatcgtgccactgcactccagcctgggcgatggagcaagactctgtctcaaaaaaaaaaaaaaaaaaagttgtttacaatcttagctcttaactttaggtctctgatccattttgaattaatttttgtatatgaaggcacaacttcagccttttgcatgtagcttgtcattaggatacagacagaaaaaaaacacattttttctttctccagccttgccatctctctctagaactctggggatgtaaagcctttcatggagctaactggcgaaggagaaagtcccagctctggctccaaagtagagtgcagattactgagattggacataatcgcttaatacctgggacatatccacatatgcatcattttttctctaagccatttgaaagtaagtacaggcatcatggatgttcacctctaaatattcgcaggcctctgctttaaaaataaggacattctcctatattactataatatcattatcactaaaaaattaacagtaattcaaatattatttaaatgtaaatgttaccaattattcctaatatgtctgttgtatctttttctcaccctaaccaatccaagatcaacgttctcatgtattgaatttagttatttctctttagcctctttttagatagtggtataatttttaaatttatttttaatttttttttcgagacaggtctcacttccattgctcaggctggagtgcagtggtacgacctctgctcactgcaacctctacctcctgcctcagcctcccgagtagctgggactataggcacgtactatcatgcgtggctaaattactttttatttttataaaatagagatggggtctcgctatgttgcccaggctggcctcaaactcctgggctcaagggacccacctgcttcagcctcccaaagtgctgggattataggtgtgagccactgcacctggccaattacaatttttttaatgagtaattttttttaaagattcaacaccagaaaaacgtttcacattctggtttcgcttcattgtttcctcatggttagattcacattaaacaatttttattaagaatacggctgggtgtggtggctcacacctgtaatcccagcacttagggaggccgaggcaggcgaatcacctgaggtcaggagttcgagaccaccctgggcaacatggtgaaaccccgtctctactaaaaatacaaaaattagccaggcacagtggtgcatgcctgtaatcccagctacccaggaggccgaggcaggagaatcgcttgaatacgggaggcagaggttgcagtgagcagagattgtgccactgcactccagcctgggagacagagagagactacgtctcagaacaaacaaacaaacaaaatgactacatagttaaatctatatacttcttgttgcctcaaatcaggagacatataatgtctccccagtattatggaagctaagtttggtcacttacttaatgtggcaattgctgaatctctgcaatgtaaagacacctttcccttgtacttaaatactctatagggccatactttgagatcatgtgaagagcctgtttcccagtgatgttacttctaaaggtttgcgcatctactgataattgccagaatcattccatcacactaggggttacaaaatggcgatttttctaattctaccattatttctaaatttattagctggcaatctttggtaaagacaaactttctccttttccttcttttacttgtttcatgtgagcaatatttacacagacataatatgtatttacttatttttgtttgttttgagacagagtctcactctgtttcccaggctggagtgcagtggcacgatcctggttcactgcaaccttcgcctctggggttcaagcaattcttctgcctcagcctcccaagtacctgggattacaggcacctgacaccacgcccagctaatttttgcatttttagtagagatggggttttgccatgttggccaggctggtctcaaactcctgagctcaggtgatccacctgccttggcttcccaaagggctgggattacaggcatgagccaccatgcccggccaaaagtcaattaagaaagtaaactcggatatttagagtaccaccatggacttaaacaatttattatcataaactattatcaccattatactttttcatggtcaaattatgctaatattggccagtgacaacctcttcagactggttcctatgttcttttttgttgtttttgatccagggtcttgctctgttgcccaggctggaggacagtggtaccatcatagctcacgacagcctcgacatcctgggctcaagcaattttcccacctcagcctcccaaatagctatggctacaggcatgtgacaccatgcccagctaactttttatgtttttgtggagacacagtctcactatgttgcccaggctggtctcaaactcctgggctccagcgatcctcttgcctaagcctcccaaagtgttgggattacaggtgtgaatggggtcaccatacctggcctacgctcttttttatataaatctattagtcttcgagcacgtccttgttttctgacacaggttattccagttgaatcagcacaaaataaaaacaaacaataagcctgtgaatgtggatagtgaagctattaagaatttcctacaacactctgggagattattaattgcaggagtggagaggtaggggtggacagtgggaggtcgtgtgtctcaaaaggttttcaatagatgaaaggcatctcttgtgggaaaacattcctcaaagaatgtctattggcaagaaagaaaagtgtgtgcttggctttaaactttaaagggccagttcctatttttacctaacaggcatgcatgtggagatcagaagtttaaatcttttttggttactttagattgtgatggaacagaattacaaatagctctttgagctaacttgtttttaaggagagaggtctgggtatgaattagtgagagacatacagagcaaacaaaaatggaggtgatttattaaccccaggggaaacgagagcagtacaagaaaggaaatgtaattcaaagcatccttcacggttcatgtgaacaagactcacacagacataagaatgtatgcattgaatgttggttcaatcaatttaatactctattggttatataacagttatcatgagggaatgagggaaaaacaaagtataggccgggcaagggggttcacgcctgtcatcccagcactttgggaggccgaggagggtggatcacatgaggttaggagtttgagaccagcctgaccaatatggagaagtcccgtctctactaaaaatacaaaattagctgggcgcggtggtgcatgcctgtaatcccagctactcgggaggtggaggcaggagaatcgcttcaacccaggaggcggaggctgctgtgagccaagacggcactattgcactccaggctgggtgacaagagcgaaactctgtctcaaaaaaacaaaaacaaaaaacaaagtatatacctgtgagttgggaagaagagagcaaaattacatctaaaattatacaaactcaagaaagagcagtatttgcaatgtttagaaataataaattacgtgtcagaaggctgggcacagtggctcacacctgtaatcccagcactttgggagaccaaggtgggcagatcacctgaggttgggagtttgagaccagcctggccaacatggtgaaaccccatctctactaaatatacaaaaattagctgggtgtgatggcacacacctgtaatcctagctacttgggtggctgaggcatgagaatcgcttgaacctgggaggcagaggttgcagtgagcccagatcgtgccattgcactccagcctgggtggcagagtgagattctgtctcaaaaaaaaaaaaggtctggtgtgatggctcatgcctgtaaccccagcactttgggaggctgaggcgggtggatcccttgaggtcaggagtttgagactagcctggccaacatggtgaaaccctgtctctactaaaaatataaaaattatatattttaggcatatatagtagtgcatgcctgtaatcccagctactcgggagactgaggcaagataatcacttgaacctgggaggcagaggttgcagtgaacagagatcgcgccactgcactccagcctgggtaacagagtgagactctgactcaacctgttaaaaaaaaaattaaatgccagaagaaacagttaatttaaagtagctgtctctggggaataagaatcaggaatggggaagagtggacagggagttgctgtttttcctgataagttttgaagcactatttgatttcttaaagtatgtatgcatattattctgataaaaaattaaactaaggaaggaaaatattttcactaaggcatctggtctacatagttttacagaatttttctactagcctttaagaagcacataattcctacattatataagctatttcagagcacagaaaaaggcgggaagctctccaattcattctgaggctaccataacccaccatggtatcagctgggattacaggtgcccgccaccatggccagttaattttttgtatttttagtagagacagggtttcattcaccacgttgcccaggctggtcttgaactcctgacctcaggtgatccacccgccttgggctcccaacatgctgggattacaggtgtgagccactgcacccggtcagatgatttaaaaactcttaccttttatttacaccaccaatcaccaattagagaatgtaattggggggaaaagccttattcacaataacaacaaaaaccttacaagaagaataaatcgaacatgaaatgtgtaagacctatataaagaaaactataaaactttacttaaggacatagaagaagccttaaagaaatggacataccctttatttggattaggaaatttaatattgtaaagatgtcaggtctccttaagtgaatctataaatccaacacattcccaatcaaaagcccaacaacattttttatagaacttgagaagctggccgggcacggtggctcacgcctgtaatcccagcactttgggaggctgaggcgggtggatcatgaggtcaggagatcaagaccatcctggctaacgtggtgaaactccatctctactaaaaatacaaaaaaaaaaaaaaagataataaaataaaattagctgggcgtggtggcaggcgcctgtagtcccagctactcgagaggctgaggcaggagaatggcatgaacccaggaggcagagcttgcagtgagccgagatcacgccactgcactctagcttgggtgacagagcgagactccgtctcaaaaaaaaaaaaaaaaaaaaaaaaagaacttgacaagccaattctaaagttcacatgggggaaatgcacacaaaatacccaagatattctggaatacgaacaatgactatgtgtgtgcgagcaggaagctggcctctgggccacttcctgggagccgcctgggtactgagactcccctgctttcaagtaccctttctctctacttccggtaaatctcagtggggaatccattttttgaggctgaagaagggtagaccccatttcacagcagggttgggcacatgacacaggcctggccaatcagaggagtctcatacctctggttgaagggatgtgcatgtgatcaaaattcagttgacctgagccccacccagaagttttctgctgaaacttcagaaagacagcctcttcccctggggtgttattacactatcagggtgtgcccagggctgtgaatggttatagcacccactagatggagagaatctgtctgacacatgaagaaatacacattctgatgacatcctttgagcccctgaatacaacctagcctgaaaatagatctcccttcagatagcctagtttcatagctaaaagtttcatactttgaagggggtttctgttacttgaaactgaagagttctagagtttctaaaatgacactataggccaggtggggtggctcacgcctgtaattccaggactttgggaggccaaggtggatgggtcacctgaggtcaggagtttgagaccagcctggccaacatggtaaaaccccgtctctactaaaaatacaaacattagccgggcatgatggcgtgtgcctgtaaccctagctacttgggaggctgagacaggagaatcgcttgaacccacgaggcacaagttgcagtgagctgagattgcgccactgcactccagcctgggcgacagagggaggctcagtctcaaaagaaaaataatactaataaaatacactataaagtcacagtaattaaaacccttttgttccggcacagatctagagcctagaaacaaatttgtggataagtagtgatatggcgtggctgtgtccccacccaaatctcatcttgaactgttatttcccagaagcctgtgttgtcggagggacctgatgggaggtaacagaatcgtgggagtggtttccccatgctgttctcgtgatagtgagtgagttctcacgaaatctgattattttatttatatttatatttttattttttgagatggagtcttgctctgttgcccaggctggagagcagtggcacaatctcagcgcactgcaccctccgtctcccaggttcaagcaattctcctgtctcagcctcctgagtaggtgcggttacaggcacatgccgcaatgcctggctaattttttttttgcatttttagtagagatggggtttcaccatgttggctgggctggtcctgaactcctgacttcaagtgatcctcctgccccagtctcccaaagcgctgcgattacaggcgtgagccaccgcgcccggtgaaatctgatgattttataaggggctttccccctttgctcagcacttctccttcctgccaccctgtgagggctgtgcctttttttccttcgtcttccaccatgatggtaagtttcctgaggccttcccagccatgtgtgagtcaattaaacctcttttctttataaattacccagtcttgggtatttcttgatagcaacgtgagaatggagtaacatgagtaggaatttaattttaataactgaggcatttgcaagcactggggaaaggatgcgtcatgcattaaatgctacagaaaaattgtccacctggaaaaaaagtgagaatattccttcacatagtacacaaaatcaattggagatgtatacatacatcataacataatgttgtaccccttaaacgtatattttgtcagttatacctcaataaagatggaggaaaaagtgcagaaggattagagagctaaaggtaaaaaaatgttagcagaaaacaatgaacatttttatcaactcccaagtagttggaattacaggcacatgtcatgttgtctggcttcatttttatacagccatatctgtcattttctttcttttttttttttttttttgagaaatagtcttgttctgtcacccaggctggagtgcagtggcacaatcatggctcgctgcagccttgacctcccaggttcaagtgatcctcccacctcagcctcctgagtagctgggacgacaggcacatgccaccatgcttggctaatttttaaaatttgtttatagagatggaatctcactatgttgcccaggctcctgggctcaagcaatcctctcacctttggctcccaaagtgctaggtttacaggtatgagccaccgcacccaacctcatcttcttttataccttctgggttgtgtcttgcttaggatggttcactccaccatcctaaggaagacaggaggatcgcttgagcccaggagcttgaggtcagcctgagcaacatactgagaccttgtgtctaaaaataaattttaaatgaaatttaaaaatttgaaacatatatacacaatttatatacaatgtaaatgtaaaacatttacattgtaaatagggtaaaaaagataaacagattgggaataatttatacaacaaatagtaacttacatagcaaagaactatacagctagatttatgaagatctcctacaaatgaacaagagaataaagacaacctgctagaaaatgggcaagggacacaaataggcaatacacacgagaaataaaaatgcactggggggccgggcgcagtggctcatgcctgcaatcccagcactttgggaggccaaggcgggcggatcacctgaggccaggagttggagaccagcctgcccaacatggcgaaactccatctctattaaaaatacaaaattagccgggtatggtggaatgcgcctgcaatcccagctactcgggaggctgaggcaggagaatcacttgaacttgggaggcggaggttgcagtgagccaagactgtgccactgcactccagcctgggcaacaagagcaaaactctgtccaaaaaaaaaaaaaaaaaaaaaaaaaaagaaaagaaaagaaaagaaatgaagactaacaaaaaaagtataaccctaactgtaccgagtatctgaactggcaaggctcaaaactgaactcattatttcattcaattaatatacgagcgcctactatgtgcctggcacaaagataaagacatcaaccttgaacgtgaaaggtgtgtgtttctggatctgcaaatatataaggttctgctttatacgtcattttaagcactaataacagccagtaactaaactaagaactttatatacattaccaagttgtcattcaattaatgtttactaaccacttattttttgacactgcactatttttgtctatagaaagacaaacaggccgggcacagtggctcatgcctgtaatcccagcactttgggaggctgaggcgggcggatcatttgagggcaggagttcaagaccagcctggccaacatggtgaaaccctgtctctactaaaaatacaaaaatgtgagctgggcatgatggtgtacgcctgtaatcctagctatttgggacgctgaggcatgagaatcgcttgaacccaggaggtggagattgcagtgagctgagattgtgccactgcactccagactgggtgacagagtgagaccctgtgtcaaaaaaaataaaataaaataaaaataaataaataaataaattagccgagcatggtggtgtgcgactgtaatcccaaatactcgggaagctgagatacgagaattgcctgaacccgggaggcggaggcagtgggctgagattgcgccactgcactctagcctgggtgacagagcgagacagtctcaagaaaaagaaaaaaagaaaaaaaaaaaaagaaaaacaaatacaaacacggtcccttccctcatgaagttcacaatctagcggcaaaggcaggcattagtcaaaagagcacacacatatataaaggaaaatcacacagcattgtaaatgtacaaagagtgaagatggcccagctgaggctcagggagagctttcctgaggaaagatctggctaatcctgcaggatgacagaagtgaattagttcacaggacacgctgggatagaaacgaaccaggaaaagtacttcaggcattttccatcaaaaagagatgttaccaggccagacatggtggctcacgcctgtactcccagcaccttgggaggccaaggtgggaggattgcttgagcccagaaatttgagaccagcctgggaaacaagcaagactcaatctttatttaagaaaaagacacattacttcagagcaaatgacaaaatagaacattttttggctcacaattcccttgttaaagcttgatttacttactgaagaagtgaagaggagtgaagaaagatatccctcaaggtctctgctgtagaaattgtgacctgaacagacgtcgggagtgaagcccacttttgaagcagatatgatttccattcatccacaggcagatccatgctgcttttgatctataaaatgagtaagaaaataggaatcttacaaatgcacaattttagaaaatcaagagttcagccaggtacggtggctcacacctgtaatcccagcactttgggaagccgaggtaggtggatcacgaggtcaggagatggagaccatcctggctaacacagtgaaaccccgtctctactaaaactacaaaaaaattagccaggtgtggtggcgcacacttgtagtcccagctactcgggaggctgaggcaagagaactgcgtgaactggggaggcggaggttgcagtgagctgagatcacgccattgcactccagcctgggtgacagagcaagactctgtctcggaaaaaaaaaaaaaaggaaaatcaagatttcattcaaggaagcctgaaacaataaaatcaattcttgtggtcttttcctctagtttatatgctaaggaaggatctatattttctcacagcaattcactcaacatccttccattcagaaatatttactgaaagactactttgtcacaggcaccatgcaggtgatggttatacaaagacgaagcagactagatagctaccatctgtgctcttagatcctcttttttttttttttgtgaggcagagtcttgctctgtcacccaggctggagtgcagtggcaccatctcggctcactgcaccctccgcctcccaggttcaagcaattctcctgcctcagcctccgagtagctgggattacagatgcgcgcaactacgcccggctaatttttgtatttttagtagagacggggtttcaccatgttggccaggctggtctcgaactcctgacctcagatgatccgccagccttggcctcccaaagcgctgggattacaggcgtgagccaccgcgcccggcctgatccctctctagtttctctgagacacatcccagatttttctttctcacccaccccagcaactattcatttaacaaggtatttccctctcttacatagttcagcgttctgattaagtcctcaccatctcgtctggcattcttcctagagtgttataattaatgtccatgccattggcaccactccccactttcaatccagcctccaacactgagacagaagtcagtgctctgcccttaaattcatcaacgctactccaagcataccaggaagcccaggacaaaaccatccttacttgacccttgtctgactttctaattctcaggtgtcacttactcctctgcatgcacccttgcatactgaacaactcattgctatccccggcttgccaggctatttcaactctccaatgttttggcataggctactcatgctttccggaccaaccctaccctggcttatggagtccacctggaaaattcccacacgttcttcgactcggctcaaatggcacctcctccgggacggcgtccctgatttcccagctgtgattccaacacccttggggcctgtaccacgtctacctggaggtggggttactgacggcataaagtgcccccacacactgtcctcttctctaaggacgggggccgggtctgattccctttcggagaccccccacccccaccccccaccgccacggtgccaagctcagggcttggaggcgggaagtcagccccgcgttgctggacgaatcgggtcactactgcgactctatttagcagcggaggtctcaaggaacagctttaacctcctctgggataccaacccgtgcactcgccagagaccgaggcgagaacgcctcgagaaccgctcagacgcgcccggaactgcgccctggtctccctcccagcgcccgcgcagctcctggcgcgccccttggcgccccgctccgccccgcaccgcgtccggcgtcccgcgccaggcctcgcttgggaccatgggtgggtcacgtgggccgcgcctcggccaatgcggcggctgcgtagcgcccgggcccgcccctgagccgcgcgcacgtcgggggcgggagcggtgcgcgcaacttctcgggccaataactgcgcagcgcgcgggacccgggtggggaagctggagctgttgcggggtccgcggggaagtcttggcggtggagccatggtcggccaactgagcgagggggccattgcggtgaggaggtgccgggggctgggccggcggtccggggtggctgcggccccgagcctcgcggagtagagagggggaggggagcccggggcgacgggggatgaacgcgaggggaggagatggcggggggcggtggggacccgccgggcgtccctctagtgtcatcgccccctcctcaaagcattctttcgatcgtctttaaaacatgctcacatttttcctacgtaagaacaaactaaataaacgcttgcctttctctgcatcttccacctgcggacactttctgtctcttctcctttccccacccacagccaaacttcttgtctggtttcagccacttcctttcctcgcctttcatcaactctttaacccactccagtcatccctttgatcgctgtagaaaaccctggctgaaggtaccagtggcctccaagttgctaaatccagcccttttccgttttcagcttacctgagttctcagcagcgtttgcgtttaagccctgcttgcttcaggtcacaccctcttccttggtttttagtggctcagcttggcaggtctatccccgtcttatttgtaagtccctctttgtaaatttttgttgaatcaaggctccctctaggccctcttgactcccgaggcaatttctttttttttctccagcctgggcgacactcactgtcgcccaggctggagtgcagaggcgcgatctcggctcactgcaacctccgtctcccgggtgcaagtgagtctcctgtctcagcctcccgagtagctgggactacatgtgtgcgccaccacactcggctactttttgtgtttttattagagactgggtttcatcatgttggccaggctgatctcgaacaccagacctcaagttatccgcccgcctcggcctcccaaaatgctggaattacaggcatgaaccaccgcgcctggccccaaggcaattccattgccatctattaatatatgtcagttgctcacaaatttctttgtacagagccacctttactctaaaagacaaacttccgtcatctgtctgcttattccatgcttcagagggttttaagttcagtatacgtatcccaaagcaaattctttatctttctaagtctgggcctcttgatccctatctccacggatggcaccattatctattcagttcagtgctaaccagaaattgagaaatcattcctcctatattgtccattacctgggcatccagtccctcacgaagtgaagtgtattttgcctctgcgtagatctatcaagcccactggcttctctccatccatactggcaccgtctttttttttgcctgagctgctgacttccactcagcatacgttcctgccaccattcccatccacagcatactctcagcctacctctccagtcacccccacatttttttttaaatttagatttctggtatattccatactcctaccttcttccatggggcctttgaacttttttttttttttttgagctggaatcttgctctgttgcccaggctggagggcagtggcgcgatctcggctcactgcaagctctgcctcctgggttcacgccattctcctgtctcagcctcccgaatagctgggactacaggtacccgccaccacgcccggctaattttttgtattttttagtagagacggggtttcaccgtgttagccaggatggtctcgatctcctgaccttgtgattcgcccgcctcggcctcccaaagtgttggggttacaggcgtgagccactgtgcccggccttttttttttttttttttttttttttgaggcagagtctcactctttctccccatacccccccactaccgccccaggctggagtgcggtggcgcaatctcggctcactgcaacctctgccttctgggttcaggcagttctcgtgcctctgcctccagagtagctgggattacaggcatgtaccaccacacctgcgtaattttttgtatttttagtagacacgggggtttcaccatgttgcccaggctggtcttgaactcccaaccttaggtgatccaccctcctcggcctcccaaagtgctgggattacagaagtgagccaccgcacccggccctgaacatttttttccctctgcccactgcctgggtggttcttcactcttccccacactggcaaacactatcttcgtatctcagctcatttgtgacttcccttactaggctaaatccctttgagaccccaattcctgttcattcacttattgaattatttattttttttctttttgagatggagtcttgctctgttgcccaggctggagtgcagtggcacgatcttgactcactgcaacctccgcctcctgggttcaagcaattctcctccctcagcctcccaggtagctgagaatacaggagactgccatgatgcccggctaatttttgtatttttagtagagatggggtttcaccatgttggccaggctggtctcgaactcctgacctcaagcaatccacctgcttcggcctcccagagtgctgggattacaggcgtgagccaccgcgcacgaccccattcacttattagatgcatgacttgaggcaagatactaaactgtttcttttctgtaaaatgagagcaatgatatctattgcataaggtaagtaggaggatggagtgagttattaaatttaaagtgcttagcacactgatacatagtaaatgctcagtgtttatgttacctattaataattgcagttttatgtttgttgatttatcagtttctttttaaaattttaaaattattgtgtttgtttgtttgtttgttttgagacagagtcttgctctgttgcccatgctggagtgcagtggcacattctcggctcactgcaacctctgcctcccgggttcaagcgattctcctgtcttagcctccctagaagctgggattacaggtgcccaccaccacaccctgctaatttttgtatttttagtagagacagggtttcgccatgtaggccaggctggtcttgaactcctggcctcgagatccacccaccttggcctcccagtatgctgggatcacaggcttgagccactgtgcctggcctaatactttgtgtaaattccatgaggcctgcaatcatgtctgggttattttactctgcattgtatccccaatacctggagaagtgctggcaagttttaggtgctgaataaatgcttgctagttgcatgaatgaatgaggcagtgggaagaaagggacaggtgaatggggaagaaaggcagcttgggggaaaaacaggaacaggaagaactattgttggactcaagtgaatatttaaataaattaggaatgtgtgaatgctgaaaccggggaagtgattttaaattgtagctttcatttactttatagctgctaccttgtgtctttaagacaaattaagaatgtttctaggccaggcgcagtggctcacgcctgtaatcccagcattttgggaagccaaggcaggcagatcacctgagattgggagtttgagaccagcttggccaacatggagaaactctgtctctattagaaatacaaaattagccaggtgtgggggcgcatgcctggaatcccagctacttgggaggctgaggcaggagaatctcttgaacccgggagatagaggttccggtaagccaagatcgcaccattgcactccagcaacaagagcaaaactccatctcaaaagaaaaaaagaaaagaatggttcttcacttttaaaaagactgatcatgggccaggcgcagtggctcatgcctgtaatctaagcactttaggaggccaaggcaggtggatcacttgaggtcaggagttcgagatcagcctggccaacatggggaaaccctggtctactaaaaatacaaaattagctgggtgtgttggcgtgtgcctgtaatccctgctgcttgagagcctgaggcaggataattgcttgaacccgtgaggcagaggttgcagtgagccgagattgcaccagtgcattccagactgggcgacagagtgagactgtctcaaaaaaaaataaagaatgatcatggagatatttaaataatttgataagtttttttattttttagagatggggtctcactctgttgcccatgctagtctcaaactcctgggcttaagcgatcctctcgcctcagcttcccaaagtgctgtgattatagatgtgagccactgcacctggccatgtttttatattcaaaattttataaacctatttccagcgtaggtgaagtattttgttcataaatgaagaatgaaagtttcacatgtgtttgtggtgatggaatgagttggagaacctttgctgactttcattatcagctaaagcaggtatcattttcgttcaaaagacacaggccacaaagggtacgcaaataccacacacatgtgaaggcgtttgggcaagagtcacatgataaaataagagatgatgcatagaactcttgtggtcaacagaatacatagcatttgtatcttaattatataacgaaaggggaagggaactaatgtttttgactatttctaatgtgacagatgctttagtagtcagtacttaagtaaccctagaagatagctattatactcccattttacagaggaaggaagtacagagaggttgaataatgtgtccatggggtgaagatttgaacacatgtgcccttgagtattacatttgttgctttatatacttactagggattttttttttaaagggtctcactctgttgcccaggctggggtgcagaagcacaatctcagctcactgcaaccttcacctcccaggttcaagtgattcttttgcctctgtctctcgattacagacgtgcgccaccacgcccagctaatttttgtatttttagtagagatgaggtttcgtcatgttgtccaggctggtcttgaacccctggcctcaagtgatctgccgcctcggcttccccaagtcctgggattacagacttgagccattgcacctggccgtaattttttttaaatgacagagtcttgttctttgtctctcaggctggagtgcagtggcatgatcatagctcactgcaacctccaactcctgggctcaagtgatccttccacctcaacctctccagtagctgggagtacaggtgcatgccaccatgcccagctaattttttttttttttaattttgtgtagagatggggtttcgccatcttgcctaagctggtctctaactcttggtctccaaacagttctcctgccttgcctcccaagtctttgggattataggcatgagccactgtgcctggccttgtcccttaaaatgagttacatttgtaaacagctgatttctttggagcatcgtccccatatacttttctttcataagtgatctcatccttcttccacccaaccttccccttgaatttgttgtttgttgttgtttccattttagcagaattcatgttgctctgataggggctcttttcaaactgatgtcttatccttcttagtacctcaaactaggtcttgttcagacatgttataacaagttagtatgagtttattttagtgcaaaaaaaatttttgaaatgcatgcatagttttttcataatgcacatttttcgtgtactttttgaatccccctcatacatgcacgtggttttaaaatcaaacggaacagaaaggtgttcatggccgggcatggtggctcacatgtgtactctcagcacttggggaggctaatgcaggaggatcccttgaggccaagaaagagtttgataccaggctgggcaacatagcaagatcctgtctctatttcatttagaaagaagaaagaaagaggtgtttaatgtaattactgacctcctgccttaccttgtccagtactgttccccagaataactgctttttagaaaaatcactgtcattgacattttgcttacgtatagtaaattgcaccttttttatttatttatttatttatttgaggcagagtttcctcctgtcaccctggagtgcagtggcgtgatctcagctcactgcaacctctgcctcccaggttcaagcagttctcatgcctcagtctccttagtaattggggttacaggtgcacgccaccacctggctaatttttgtatttttaatagtgatggggtttcactatgttggccaggctggtctcgaactcctgacctcagatgctcctcctgccttggccttccaaagtgctgggattacaggcataagccaccatgcccggccaaattgcacgtattttaaatgtacagcttgatgaactttgacaaatgtgcgcacccctgtaaccacattgcccctgtggagatatagaatacttccatcaacgcacaactcctcttgctccttccccacctccatcctcaccctaggcaaccagtgttctggtttctacctttgtaggttagttttgcctttcctaagacttcatataaatggaatcaaataatatctatccttttgtgtctggcttctttcagcagttttttttttttccccagaggtagggtctctgtcacccaggctggagtgcagcgacacagtcatggctcactccagccttgacctcctgaactcaagagatcctcgcacctcagcctcctgagtagctgggactacaagtgcatgccaccactcttggctaattaaaaaaaaatttttttttttttttttgagacacagtcttgctctgttgccagactggagtgcagtggcgcaatctcagctcactgcaacctctgcctcctgggttgaagcgattctcttccctcagcctcccgagtagctgggattacagccgcatgccaccatccccagctaatttttgtatttttagtagagacggggcttcaccacggtggtcaggatggtctcgatctcttgacctcgtgatccacccgcctcagcctcccaaagtgctgggattacaggtgtgagccaccacgcccggcctaaaaatattttttgtagcgatggagtcttggtgtgttgtccaggatgatcttgaactcctgggctcaagtgatcctcccaccttggcctcccaaagtgttggggttacaggcacaagccaccactgtggaccaaaatggtttttgagatttacccatgttaattcagtaatctgcacctttttatggctcagtagtattccattgtatgactataacaaaatttgtttatttacttattattgcacatttgggttattttcatcttttggctattataaatgaagatgctatgaccatttaagtacaactctttttgtggaaatatgttttcgtttctctgggataaatatctaggaatgtaattgctgggtcacaggtaactgaatgtgtaaaagaaatcgccaaccttttccagtgtgatcatgagaattctagttgctccatatccttgccagtcatcagtctttgatttcgagtattctagtgaatgtgtaatggtatctcactgtgcttttatttgtatttctctggtggctagtgacgttgagcatcttttcgtgggcttactggccatttgtatatcttcacgaaagaagtgtctgttcacatcttttgttcacctaaaaattgggttttgtgcttattaatgagttgtgagaattcttgattcttgctaggtcttttgttaaatataaatattacatatattttttcccaatctgtgacttgccttttcttttttgaaattttgttttttttgaagtgcacttttaaattttcatgaagtccaagttatcaggttgtgtttttttgtttgtttttgttttgttttttgcagagttgtgtttgtgtgtcctaagaaatctttgctaggctggatgtggtggctcatgcctgtaatcccagcactttgggaggctgaggcgggcggatcacctgaggtcgagagttcgagaccaacctggccaacatggagaaatcccgtctctactaaaaatacaaaattagctgggcgtggtggcaggcacctgtagtcccagctactcgggaggctgaggcgggagaatggcgtgaacccgggaggcggagcttgtagtgagccaagatcgcaccactgcactccagcctgggcaacagagcaaaactccgtctcaaaaaaataattaaataaataaaataaaaacagcagggtgcagtggctaacgcctgtaatcccagcactttgggaggcaaagccgggcagaacacctgaggtcaggagttcgagaccagcctgaccaacatggagaaatcccgtctctactaaaaatacaaaattagccgggcgtggtggcgcatgcctgtaacctcagctactcaggaggctgagtcaggagaattacttgaacccaggaggtggaggttgtggtgagccaagatcgcaccattgcacttcagcctgggcaacaagagtgaaactcagtctcaaaaaaaaaaaaaaaaaagaaatctttgcctacccgacccaaggtcacaaatcttttatgctgtgttttcttccagaagttttatagttttcgctttgccttgtggtctgtaatgcatttcaagtttactattttatctatgatatatagctcttttttaaatacagatattcagttgttccagccctgtttattgaaaacactatcccatttcattgagttacttagtcactttatttatttatttttttaattttttatttttgagatggagcctcgctctgtcacccaggctggagtgcagtggcacgatctcggctcactgcaagctccacctcccggattcacagcattctcctgcctcagcctcccgagtagctgggactacaggcacccgccaccatgcccggctaatttttttttgtatttttagtagagacggtatttcaccgtgttagccgggatggtcccaatctcctgacctcgtcgtgatccacctgcctcggcctcccaaagtgctgggattacaggcgtgagccactgcgcccggccccttagtcactttatataaaatcaatggactgtatatgtgtatctgtttctggaatgtcaattgatttctatgttggtgcttatgtcaataccacatcatcataaacattgaagatttatagtaaatcttgaaatctggcattgtaaattctccagcttcatttttattttttattttttattttttttgagatggagtctagctctgtcgccaggctggagtgcagtggtgagatctcggctcactgcaacctccacctctcgggttcaagcgattctcctacctcagcctcctgaatagctgggattacaggtgcccgccaccacacccagccaatttttatatttttagtagagacggggtttcactatgctggctgggctagtcttgatctcccaacctcatgtgatccacctgccttgggctcccaaaatgctgggagtacaggcgtgagccaccgtgcctggcctctagcttcatttttttttttttttgagacaggatctcacttagtcatccaagctggagtgcagtgacatacatgatcatagtttactgcagctttatctccctggctcaagtgatcctccctcctcaccctctgagtagctgggacgactgcgcccagctagtttttttttttttttttttttttttgagacagggctttactatcactcaggtagagtacagtggtgccatctcaccttactgcagcctctgcttcccagatgcaaacaatcctcctgcctcagcctctcgagtagctgggactataggcatgtgccaccacacccaactactttttgtattttttgtagagacggggtttcaccatgttggccaggttggtctcgaactcctgacctcaagcgatcctcctgtctcagcctcccaaagtgctgatccctttgcatacactgaagtatagagaaacaaagtacaataaaaaaaaagaaaaagaaaatgaaaacagacgtttgtttgtttgttttgagacagggtcatgctttgtcacccaggctggagtgcagtggtgcaatcacagctcactacagcctagacctcctgggctcgagtgattcttcctcagctttctgagtagctgggactacaggtgtgcaccacatacctggctaattttttttgagatggattctttctgtgctgcccaggttggagtgcagtggcgcgatctcagctcactgcaacctccgcctcccaggttcaagcaattctcctgcctcagcctcccaaatagctgggactacaggcacgtcccaccacgcccggttaattttttatatttttagcagagacagggtttcaccgtgttagccgggatggtctcaatctcctgacctcgtgatcctcccaccttggcctcccaaagtgctaggattacaggcgtgagccaccacctggctaattttttatagagacaggtctccttctgttgccccgactggtctcgaactcctgagctcaagcgatcctcctgcttccgtctccgaaatgctgggattataggcaagagccgccgtttgcagccttgttggtagttttcggtgtgcagttcttacatatgtatactgttaaatatatccctaaataatttacttttgaagcctggcacggtggctcacgcctgtaatcccagcactttttgggaggctgaggcgggcagatcaccagaggtcaggagtttgagaccagcctggccaacgtagtgaaaccctgtctctactaaaaatacaaaaattagccaggtgtggtggtgcatgcctgtaaccccagctacgcgggaggctgcagcaggagaattgcttgaacccgggcattagaggttgcagtgagctgagattgcaccaccacgctctagcacgacagagcgaaactccgtctcaaaaaaaataaaataaaataaagaaagttcttttgatggtgtttaagtggcatttttgaaaatttcattcttcagttgtttattgctagtatattgaaatacaagtgattattccacaccagccttgtgtcctgcaaacttgctaaatcaacttactagtttttatagataccttaggattttctatgtaaacgatcatattgtctacaaataaaggaagttttatctgttcctttttaatctttttattttttattttgagagggagcctcactctgtcgcccaggctggagtgcagtggtgcgatctcagctccctgcaacctccgcctcctgggttcaagcgattctcctgtctcagcctccccagcagctgggattacaggcatgcgccaccacgcccagctaatttttaaatttttgatggaaacagggtttcaccatgttggccaggctggtctcaaactcctgagctcaagtgatttgcccgccacagcctcccgaagtgctgggattacaagccaccttgcccagccagttcctttttaatctttatgactttttttcccttgccctattgcattagttagaacctctaataccacattgaataaaggtgttaagaggtatatccttgccttattcccaatcttagtagcatattattgtcttttactgttaagtgtgatggtaaccgtagattttttttgtagacgtcagctatcagtttaagcattacttctatgcctagtttgctgagactttataatgagtaagtgttgccttttccgtatctattcagttgatgatgatttttctctattctttgaatgtgacaaattacattgatttttcagatgttgagtaaaccttgccttccttggataaatcacacttggataatatgtcatgacatattatccattttatatagtgctggatttgatttgctattattttgttgaagattcttttttttaaacagagtctcgctatgttgcttaggctggtcttgaactcttgggctcaaagcagtcctcccacctcggcctcccaaagtgctaggattataggcatgaacctctgcatggggtggtctttgtttttttttctgtcgtagtaaacctaacatcataaaatgacttggaaagaaagtattgtcttttctattttctgaaataatttatgcaagtttttttgtttgtttgttcttaaatgttagataggattcaccaataaagccatctggacctagagggttctcttttggaatatttagaattataaattcaatttctttaatagacatagagctatatagattttcttttgtatcagttttgataatttgtattttttgagggatttatccactttatcttggttgtttaataaagttgttcctaatactcccttattatctctttaatgtatataggatttatttatctaattccctgttaatgagcactagagggaaatgaatggctgttaagaataacgagtacatatgggataccggtgctagagatgtgctaagtgtttccttgtaaaacacgtatctccctcttatcattttatgatttgtccagagtgataaactagatgcttcagctgacaggctctgaataggctcttttaacaatcttatctatatattccaaataccaactataaaaacatgtcattttcatcatgatttgagtgcgtatctcacacaaacctgtttttactccctcaggccatcatgcagaagggggatacaaacataaagcccatcctccaagtcatcgtaagtacctgcgtatgttatgttccatgtcaacttctttggagtcatcgaattacaagttacgtttgatgaaggacagacagatttgtccactttcggaaattcacccccagtcacaaaaaataggccagtctacattgtaaccctgagagagcagccaggctttttgaaaatgttactacgtgagctgctaagttctactgtctttggagattcagactgaaggctttgcctctctcttcctccccactgttgatagatgactgtggagctacttgcctttcctgcccttgggtttgtcttgttcacattggcctttcatatgacctccagaaatatatctagtatgaacttgtctcttttacattcttcagttaacacatcatttatttaaggggttctcaaacttcagtgggagttttgaaaaatagaagcagaatggtgggctcacccctgcaggttttcagtcggccggtctgatgggtctctctgctgcaccacacgcgccgtgggtcagcttggggctctgggtacaggtgtcacttgctttggaaacctgcctctgctctctctcaggtggggataaaggtcccggctctgccgcctgatcacggacacatcacttacgtctctctgcctccatctccaccccagttgttagctccttcaggacaaggattctttttattcattttgtatttttagcatgtttcctacacagcaccttgtgtatattgggtgcttcattattattattattattattattattattattattattttggtaattgatttttaaccatatttgagtcaggggtgagaacacaagagtataggcagctcgttttacttccctctctgttgtgtttaataatgttagtggagggaggttagtgggaaaatcatcaaatccagttttcttttacttggatttaagtgtcaagagaatgggcaaacagtttgtgttgaactaatggcaaacccactctcctgccacttcggtttacgtatccctggggacggggcagacaacctggctaatgaatcaagttttctgtcctagaacatccgtcccattactacggggaatagtccgccgcgttatcgactgctcatgagtgatggattgaacactctatcctgtgagtatggtgtatccatctagaaatgtgtgagtatttaaatagtagaagcacacctggtcctttggttgccataatttgggggcattcgtgaagtccgtacttgcttggctacgtacttcattcagacagaattgcagctgtcagagagcattctaacaatagactggaggtagtggaaagctgccacttggcttaattaattttccctaactggtgttctgtgttttctctgattaatttccctaaggatgatattgacatcgactgagtgcgaggggtcagctgccctatactttccttttctggggttttatttctgtgttggaagctgtaaaggggagaaaggagagaatttttaaatgattttggccactttaacaaattcacacatttaagagtagcagcaaatgtttaacaggcagcaaaatacacagtttttcactctgcagagtctgactagttttaatttcaggagcatatgtaaggcatttttctttgctagcacaggtatgagtagctctcagaggcttaagactgcaggattttggaggctaaagaaatctctgtggttttcagctttcatgttggcgacacagttgaaccctctcgtggaggaagaacaattgtccagcaactgtgtatgccagattcacagatttattgtgaacactctgaaagacggaaggtatgtgctgtgtttttttctgtcttattgtatcgtagaatgggaacaaatttaggaataaaaaaggcaatagtgagttttcagctaagaatctgcagcttttcagttaagaactcaggtagctaacacatggcacccaaggaggagaaacatggaaacaagttggaaatttcagagcagaagattaaagtagaatgcagaaatcttgttatttctaatttcttcagaagcagcatttttaggatttcccccaaaagaatcttatctcttttgtttgtttttggtagaaacggggttttgccatgttgcccaggctggtctcgaactcctgagatcaggcaatctgcccacctcagcctcccaaagtgctgggattacaggtgcgagccatcatgcccggcctcaaaagtatcttttaatgaaaagaggtactttattttacagcagaaaatgataattattttgtaatgctgctttgtgtgtgtgtgtgtgtgtgtgtgtgtgtgtgtacaatcttgaatcttttatattaaatgctatatttagccaatatagaatacattgaaccacatgtggtggctcatgcctgtaatcccagcgctttgtggtgctaaggtgggaggattgcttgaggccaggagtttgagaccagcctgggtgacatagccaggccctgtctctacaaaaaaaaaaaagttaaattagtgaggtgtggcggcacacgctacagtcctagctacatgggaggctgaagtgggaggattccctaaccccaggagtttgagactgcagtgagctgtgattgcaccgccgcacttcagcctgggcagcacagcaagaggccatctctaaaaaaataaatttaaaaaaagaatgtgttgtacacggacaagttactgcatgctagagatacagtgatgaacagaactgttactctcattgctaaaacatgactgatttcaggcaaggtgcagtggctcacacctgtcatgccaacactttgggagaccaggtagggaggatcacttgagcccaggagtttgcaaccagcctggacaatatggtgagaccttgtctctacgaaaaaaaggaaaagttagctgggcgttatgacatgtgcctgtggtcccagctactcggaaggctgaggagagagagtggcctgagccctgagaggtgaaggttgcagtgagctgagatcacgccactgcactccaggctgggcaggagagtaagaccctgtctcaaaaaagaccaaaacaacaacaacaaaaaccgagataaaaaatgataacaatactaagaggtttaagtaattagttttttaaattctgttatactgattttaggactcttacattttctccagctgttcttttttcctacctctttatctctgtgttggttggatttcactcaataacttttttctggactggctctttagtgccgtcttccccattatcagcctgttggtctttatgctagaatgaccacttgcctggctgtctattgttaggttatgtggctttaccctcagaattttgtcttctggcattgaatgttgatctggagaagtcttaaggccagcctggtttgatttcttcccttgtaggaagctttgctttttttttttttttttttttttctcctgaggcctcactctggttgcccaggcgggagtgcagtggcaccatcagggctcactgtagccttgacctcccgggctcaggtgattctcccacctcagcctcccgagtagctgggactacaggcgcccaccaccacgcctggctaattttgttttgtatttttagtagagacggggtttcaccatgttagccaggatggtctcgatctcctgacctcgtgatccacctgcctcagcctcccaaagtgctgggattacaggcgtgagccaccgtggccggccgtccatattcttttttcttctggtatgtggtatgcttgttcagtctgccgattcagttcttttcaacgaagtttttctgtgtgttattccttaatgttgttttctatttcacttattgagttccagttttttacatacgttgtagataactttgatctccgcataggtctttactttaaccttttttctgatggatgcattggcttgcttcgaggttttccaacgtaatagtacagtttttagttttctctcttctactcctcaatctttataaattattagatgtataatagtattgattttgttctgtttttttcttagctgttcaagctcccttttcttcttagtctcttgttttagctcatcttttgactgttaatttgttggattcatatagtcgtacttattttgccaatcgcttttgggaagtgtcactccttttcttggcttgtactttcttccagagtgggttctttaatcggctttgcctccctgttgctttcccttttatgcattgttgtgtattgtattgttgctttgtcatcatccctttttattttgttcatgcttaatgtggacagtcctgtccagacttggtatttgctctgacatagtctaggctaggtacatgttgccaaccttctcacttgggaccttttatcttccactccaggctatcttggagcgcttaagtggtgttttgcagccacttttctgtcctccagggcatggttgtgggagagggtggaagtgttgctgggattgagtgcagtccttgctgggaaacttcacagcccactctctccagtcacggagacagctccactcccctgggctttgcctgatggcactgcctcagcttgcaggcttgcctcatattcttttgtacctctgctgagagcctgtgtgtgcggctgggtttatttactccttgcttttttggtgatcattcaggtttattctaaacaggacttgagcagtcatccttgtactttatcttaacgtgtttatgcttttatttctgaataacagatcattagaatttgtattgtggggtcaacggacatctgtggaaagtatactaattatactcataaatgttatataagagtatctattggccaggcacagtggctcaggcctgtaatcccagcactttgagaggctgaggcggggcagatcacaaggacaggagatcgaaaccagcctggccaacatggtgaaaccccatctctactaaaaatacacaaattagctgggcgtggtggcgggtgcggcctgtaatctcagctactcaggaggctgaggcaggagaatcgcttgaacccaagaggcggaggttgcagtgagccgagactccagcctcggttacagagcaagaccccatctccaaaaaaaaaaagcgtatctctgaatagacaaatccatagaaacaaattcaatgactggttctcaggggtggtagagtgtggagtgactgtcattgtacacatggtttcttttgctgatgacaacagtgttctaaagtgaggtagtggtgatgcttgcataactgcaaaatgcaaaacccataggattatccactctggaagggtgagttcattatggtacgtgaatgatatctcaataaacatgttatttaaaaagaagtgtttgccattaagcttgtcaacatactgtgtattagtcatattttaaagaataattatcagccaggcacggtggctcatgcctgtaatcccagcactttgggaggctgaggcaggcagatcacctgaggtcaggagtttgagaccagcctggtcaacatggtgaaacccgtctctactaaaaatacaaaaatcagccgggcatggtggcacatgcctgtaatcccagctactcgggaggctgaggcaggagaattgcttcaacccgggaggcagaagttgcagtgagtcaagattgcgccattgtactccatcctgggtgacaagtttttcttgcccaggctggagtgcaatggtgccatctcggctcactacaacctctgcctcccgagttcaagcaattctctgcctcagcctcctgggtagctgggattacagatgtgcaccaccatgcctggctaatttttttgtatttttagtagagacggggtttcaccatcttggccaggctggccttaaactcctgaccttgtgatccacccacctcggcctcccaaagtcctaggattacaggtgtgagccaccgcacccagcctgttcctttttatggcagaataatactctgttgtctagatacatcacattttgtgtatctattcgttagttgatgggcattcggattatttctgcctgcttgctattactaataattctatgaacatttgtgtacaagttttttgtggacagacgtttccatttcttttatagataatctgtctaggaaaggaattgctaggctaaatggtcattttatggttaactttttgaggctattgttcaaagtgtgtacaccagtttacctccctgccaacagcgcgtgagtgtggagtttctccccgttcttgccagtacttcaaattacactccatagagtttcagttaaacttctctgtagactatttagtagtttatagacaaggtctttctttactttttccctccaaatttttgttggctgttctttttttttttttttttttttgagacggagtctcgctctgtctctcaggctggagtgcagtggtgcgatctcggctcactgcaagctccgcctcccgggttcacgccattctcctgcctcagcctccccagtagctgggactacaggtgcccaccgccacgcccggctaattttttgtatttttagtatagacggggtttcactgtgttagccaggatgatctcgatctcctgacctcatgatctgcccacctcggcctcccaaagtgctgggattacaggcgtgagccaccgcacccggcattccttattctcatatttgtcattttgttttttttttttttaattttactgtattgacagcgctgtcaaaactttgttggacgatggtaatgtcagcagttgcctgattttcatggaaatgcttttggtttcactgttcaatgcagtgttgatcgtggaaaaacgcgcagtttaccaggtgcaggttttattttttaagtcctcaggatttcatcagaaatggctcgtaaattctttcaaagcttttactacatcttgatatgatcatatttaatgaactattttaatagattatctaggctggacgtggtggctcatgcctgtaatctcaacactttaggaggccgaggtgggtggatcacttgaggtcaggagttcgagaccagcctggccaacatggtgaaaccctgtctctactgaaaatacaaaaattagccaggcgtggtggcacatgcctatagtcccagctactcgggggactgaggcaggagaatcacttgaacccgggagatggaggttgcagtgagttgagatcgccccactgcactctagcctgggcgacagggcaagactccatctcaaaaaaaaaaaaagattacctaatattcaactcttgtttcattcttgcgataaatcctgccttaaaaaaataatcctagggctaggctggtggctcacgcctgtaatcccagcaccttgggaggccaatgcaggtggatcacctgaggtggggagttcaagaccagcctggctggccaacatggtgaaacaccatctctactgaaaatacaaaaattagccaggcatggaggcacacacctaatagtcccagctactcgggaggctgaggcaagagaatcacttgaaaccaggaggcggaggttgcagtgagttgagattgccccactgtactctagcctgggtgacagagcaagactccgtctcaaaaaaaaaaaaggattgcctaataattcaactcttgtttcattcttgcaataaatcctgccttaaaaaaaaatcctaggctgtgctggtggctcatgcttgtaatcccagcactttgggaggctgaggcaggtggatcacctgagatggggagttcgagaccagcctggccaacatggtgaaaccctgtctctactaaaaatacaaaaattaggtgtggtggcgggtgcctgtaatcccagctactcaagaggccgaggcaggaaaattgcttgaacctgggaggcggaggttgcagtgagctgagattgtgccactgcgctccagcctgggtgacagagtgagactctctctctcaaaaaaaaaaataagaattatcttagcttgctaattttctctttttatttttaaaaatcttttttctggaaaactttaaacatctacaaacatagacagaatacacagtagtctgatgaatccccatatagcccatcattcagctccaaattgtcatctgttgtccagttttgctctagctccatcctttcaacgtccactatcctctgtaattttgaggtaaatctcagacatcatattatttcatccataaatattttagtatgtatttttgaaagataaaaactcttaaaaagacactatcccatttcacacctaaaaaaataccgtccgtgttgtatttccatcttgttgtatatgtgcgtgtgtatgtgcgtgtgcgtgtgtgtgtgtgtgcccacacaatctatatgaatcagaatccaaaataagtttcctgtgacggtagattgatggtctgttaagtctctctgaatctgtaggctctgcgtctgccttttttctcctttactgtttatttgctgaagaaaccaggtcatttatccttcaccttgtgcagtttcccccagtctggatttggctgattgcatccctgtaaagtcacttaatgtgtccttgtcatctgtattctctgtaagttgatattagtgtattcttttaatatgctgctaggttcatcttgctgatattttatttaggatttatgggatattgcaggatgaaattagttttggttttgtgtgtgtgttttgtcttaggttttagtattagagtcatactaaatgattcataggccttctatttttatatgttctggagtgatttgtataatttggaaagtagttaaatatctgccactaagtatcagatagttattacagggaatctagataccattttcaggaacagataatttcaggcttatcttattgaaactctgatgtgaaacctgataagggtagcacacactgattgattgtatgtaaaaatccaaattatagcagtcagaccatttaaaacaaacgattgattgtatgtaaaaatccaaaaacagcagtcagaccatttaaagtctaaaacgtgatgaatttgggtagattattgcttaaatattgccctaggcctgtttcttcagctcccttgccactaacctcattcaggcctctgtcattttgtctcttctcttggtctccctgcctccagtcatgttcccattaaattccttctttttaaaatgcagacattgtgatatgctcatcaagtatgtattgagcaacaactgtgggccatttgcttcattaagcactgagggatacctgtctttattgacagtacagtctagtaggagcgagagagaataataaaataatcactaatgaacatataattaagacggagcagagtgttctgaaggaaagaaatcaaggctgtaggaaagactagaacaaagcaacctgatctcaactagagattaaggaagtgtctcttgaagtgatgtttgagacgagagctaaaaaatgagtattagatgaggcaaaatgagaaggaacacaacaccgcaatctcagagcatcacggacaaaggccttgtggcaagagggactgtcccatgtggtggaactgaaagaaaacaggaaggccagagggcagagggcagagggcaggcagcggcacgggaggggggttagcaaggccaggccaggcaagccatggcccaggtttttctttgtggcctaaggtcattgggaagttatcacaacgttttaattagagttaaaaagcaaaagaactgtaagttcttaaaaatgggtcattattacattttttaaaatatctattgtcataattggttttcactgggaaaaagtcattgttgagataagtatgtgtttctgaaaacagttcatctctttttatgccatatattcttgtgtttagtaatctaaattcttaccatgtcggttggctccttgaagatacggtgcgtagcgagaacactgcattttaattaaggaactagttgggaactgaaaaccctgcaatcacttgataatgatgcggcgaaagatgaagagaaatatttatgtaaacagatgacaaatggaaaatagttcatcacaatgatcatcggggaaagcattttgagtagcttatcatttgaacagaatttgtttttctaacctgtttctgtttgtctgcttttgcaggagagtagttatcttgatggaattagaagttttgaagtcagctgaagcagttggagtgaagattggcaatccagtgccctataatgaaggtaaaatgctttggcgtaggttgtagcactcaaatgaatacctctttatatattcggagttctaccttttggattcagtttgacttgttagtgttaataaaatgatagtgattctgaggtctaggaaccaggctattctgtcaggctttttcagttctaaagaaatgatgtatgaagaaagggcacaattagaaagcaatggacaaacgggttgggtgcacggtggctcacacctgtaatcccagcactttgggaggccaaagcaggtagatcacttgacgtcaggagttcgagaccagtctggccagcatggcaaaactccgtctctactaaaaatacaaaaagtagctaggcatagaggcctgcgcctgtaatcctagctactcagaaggctgaggcagggaaatcgcttgaacccaggagacagaggtttcagtgagccgagatcgtgccactgcactccagcctgggcaacagagtgagactctgtctcaaaaaaaagtaagaaagtaatggacaaagattcagttatactagactaaaaaaaaatctaggatatcacagtaatataggatactacaggatatctgtaatattaatgagaaacgtgttttcctaagacttatgtacacttttgtttttaaaaagtgtgaagcatgcagtctatactcctgtgataacactcactgcactggtagcttttagaattatctctatttactgctaagccatgagtaaactgtgtgaaggtagagatcatgtttgttctagtgcctaacttgaggctggcgtttagtaagtatttgttgaaacaagttgaatatataacgttgttttactgtgattatctcttgatggtgaaattactaatgatttaattttctcatgaaaatgtatagaaaagcacattgaaataaaaaaagtccattttttctttgcatcctaaaagaagctgaaaaaaaagtcattacttcagacaattctagagaaaggcgaaaagaatcttcaaatcactggccccattaaaggaaaggattgtttgcccttacaccaagtcaaaacataaaagcctcatttgacaccaaaataaatttgagatgtatttttttcaagttagaaaatgaaaccatcaaaaatcaagaggaagaggctgcacaaatagattggaataattcacaatgaatatttgattacattgaaattttaaaattacatattaaaaataggaaaccaggtacggtacctcacacctgtaatccctgcactttaggaggctgaggtggaagaactgctttgagtgcaggaggacgagaccagcctgggtaacacaggaagaccccatctctgcaataattttttaaaaacttagccaggtgtggtggctcacacctgtagtctcagctacttgggaggatgaggtggggggattacttgagcctgggaggttgaggctgcagtcagctgtgatggcaccactgccctccagcctgggaacacagcaagtgtccgctattccccactgcaaaaaattaaaagtgtgtaaactaggataaaatatttgcaactcataggattgacaaagggttactatctttactatttattgaatttttttacatattaaggaataaagtacttcattagcaaagcaggcattggagaaaaatagatggttcactatagaaggaaaacaaatggctaatacattagaaaacatctccagcctggctcgttatctttgtcttgttcctgatctcagggagaaagcgttcagactttcaccattaaatgtcatgttaactgtagggttttcttagagtctttttatcagaagtaaagaagtttatttctgttcctagttggtgagggctttcatcagaaatggatggtgagttttgtcaaatgcattttctgtgcttgctgatgatctgatgatcatatggttttctttgttagttaatatggtgagttacattgattgatttttttttttgagacagtctcattgcatgacccaggctggagtgcagtggtgccttctaggctcactgcaacctccgcctcccgggttcaagtgattctcgtgcctcagcctcagagtagctgggattacaggtgtatgacaccacacccggctaaaattgtgtgtgtgtgtgtgtgtgtgtgtgtgtgtgtgtttagtagagacagggttttgccatgttggccaggctggtctcgaactcctgacctcaagtggtccacccgcctgggcctcccaaagtgctgggattacattgcgctcagccacgttgattggtttttgagcgctaaaccaatctgggatctctgggataagtctatgtcatgatgtattattctttttacatattgttggatttgatttgctatatccctttgatctgatttactttgtttagaattgttgtatcggtattcacgagagatatttttctttagttttcttctattgttacatctctgattttgatacctgagtaaccctggccttatggaataagttgggaagtgtgttccgttcttaaattttctgcagcagtttatgtagacttggtacttcttccttagatgttcagttgaattcaccagtgaagtcatctgggcctgattttttttttttaatggaaaagtcttaaactgtaagttcagtttctttaatagagagatacagggttattcaagcacccttcttgagtagactttggtagattatgtgcttcaaggaatttaatttcatttaagttcttgaatttattagtctatagaaatataaatattctaaacaccccaattattagaaattatcagatggatttaaaaaatatatttccagctgggtgcagtggctcacacttgtaatcccaacaccttgggagaacgaggcaagccgatcgcttgcgcttgggagttcaagaccagcctgcgcaacatgataaaacccagtctctaccaaaaatacaaaaaattagctggatgtggtggcgctcctgcacctgtggtcccagctacctgagcccgggaggtggaggttgcagtaagccgagatggcaccagtgcactctagcctgggtgacagagtgagaccccataaaaaaaaaaaaaaatgccaggtgctgtggctcacgcccataatcccaaaacttttggggaagctgaggcgggcggatcacgaggtcaggagttggagaccagcctggccaatatggtgaaaccttgtctctactgaaaaaatacaaagattatctaggcgtggtggcacgcacctgtagtcccagccactcgtgaggctgaggcaggagaatcacttgaacccgggaggcgaaggttgcagtgagctgagatcatgccacgggcactccagctgggccgacagaatgagactctgtctcaaaacaaaacaaaacgaaactatatatagtttttatttatttatttaatttttatttttatttaatttttacttttttaatttactttttttatttaattttttatatttttagtagagacaggattttgccatgttggccaggctggtctcgaactcctgccctcaagtgatctgcctgcctcagcctcccaaagtgctggaattatagcatatatatatattatataacatacatatatgtttccttgttatcctttgagtgtctgtagaatttgagagtttcatcaatcttattgatctcaaaggagcaacttttggttttattgattttctcttatgttttgtattctattgatttatgctttttatctttattttcttctacttacttcgggttttgtatatttttttctcgtttcttaaggtggaagctgagttcattgacttgagatctttttttctaacataggcatgtagcattataaatctgcccttagctactgctttaaaagtatccagcaaatttggatatgttatattctcattcatattcaattcataatactttcttatttccctttcaatttcatcattaacattctgttatttagaaatgtgtttagtttttaaatgtggggattttctctttttttctttttctttttcttttttttttttcaaagataaaatgagtatttaattcagtttcagaaaaaaagggtacattacttcgatgagaaagcataaaattaagaggcttttctggaaatccaagaaaaagaaataaccattaatatgttcaatgataattttctggatcttcctcgtgtccaaagctatatattttctcctcaaaagcagctgctccaagaactaactagccctctttatctccctctagctgggacagactaattcccctccacccccacctctcttctttcaataacactgtgtaggtgttaatggcctgggctctcaccaatgaagagaattgtcctttaagccagcaacccacaggtagtggcacccaaagcctcaccaacccaccccccacccggcccgtccccagggcagaagccacagagctggcattgtttccactgtctcaggaagaaggagccaaaagctgaccctcagcacaaatcaaagcccaatatggagagagaataactgcttctaggccgagagtaggcaagctgtgggcaaaaaaggggagtttttgcagccacctcatctttagaaacaaggggaaaactagaccgttttccactattaaggtctaccaggtactctactgctccaaggagatctgaaaatacaaaaggatctaaacaaataaggagaacttttcccaggctggagataagaatgacaaacagaaagatgggtgaatgtaataatgtgtaggaagatgatgctgggagcctcctttcttcacatggctgccagccccatagaggacaacacagtaagaaccaggacaaccactccagactggtatagctggggaatcttcaggccttttcctaggttccacatcaagtgtcggatcccattccaggtatgatacatgagagggaagacgagtgcaaacttagctgtgtggatcagtgctggccccagacacagggacttcacaagttccaaataagactcaaagttcccagggagtaacacggccgacatgccaaaaagagagacccctgcactcaaagcaataccagtgccacggtggcagatggacatcgccatgggaagagaccaatttctgatacagagctgagggctaaagtgggctcggaggcaatgacgaccaacgtgtctcagcaacagcgcagccatcttgggttctggtctctctttttctttttttttttgagacagagtcttgctctgtcacccaggctagagtgcagtggcacaatctcggctcactgcagcctccgcctcccgggttcaagcgatcctcccacatcagcctcctgagtagctgggactattggtgtgtgccaccatgcctggctaattttttatatttttagtagagacgcggttttgccatgttggccaggctggtcttgaactcctgccctcaagtgatctgcgtgcctcagcctcccaaagtgctggaattacagacatgagccatcgtgccagccaaatgtgggtattttctagagatcttgttcttgatatctaatttaattctagtatgatcaaacaacatactttgtatgacttgaatcctgttaaatgtattgtcttattttgttttattttatttatttatttttattttattttttttttttttttgagacagagactcactctttcacccaggctggagtgcagtggcatgatcttggctcactgcaatctccacctcccaggttcaagcgattctcctatctcagcctcccaggtagctaggactacaggtgcctgccaccatgcctggctaatttttgtatttttagtaaagacagggttttgccgtgttagccaggctggtgtcaaactcctgacctcggatgatctgcctgccttggcctcccaaagtgctgggattacaggagtgacccaccttccccagccttgagtcttattttatgtccagattatggtctctcttggtaaattctgtgtgtacttgaaaagaatgtgtattctgttgttgggcagagtcttacaaatgtcaattaggtcgagtcggtaaattgtgttattcagtttttctatatctttactgtttttctgtttacttgttctgtcatttactgagagggatattgaaatctctaactgtaataattgtaagtttctctgtctctctgcagttctattagtttttgcttcatgtatttcaaagctgtattattaaatatctatataatttagaattcttgtgtccacttgatgagttgactcttattattatgaaatgattttatccctgggaaattctgtgctttgaagtctgctttgatattagcatagccactttggcgttttttttgttttgttttgttttttctctcctagagacaacatcttgctctgttgcccaggctggagtacagtggtacattcacggctcagtgcagcctcaacaccttgggctcaagcaatcctcccacctccgcctcctgagtagctgggactacaggcatgtgccaccacgcccagctaattttattttgttttttatttatttatttatttttgagacgaagtctcactctgttgccaggctggagtgcagtggcgtgatctcggctcactgcaacctccgcctcccaggttcaagcgattctcctgcctcagcctcctgagtagctagggctacaggcacgcatcaccatgctcagctgatttttgtatttttagtagagatagggtttcaccatgttggccaggatggtctccatctcttgacgtcatgatctgcccgcctcagcctcccaaagtgctggggttaaaggcgtgagccaccataattggcctaattttattttttgtggacatggagtcctgccatgttgcccacactggtcttgaattcctggcctccagcaatcctcctgcctcagcctcccaagtagttgggactgcaggctgcacctgtagtctgggaggtggagtgccgggcctgcctgtggactgcctggactggggctgggacggcagtgccaccacgcccggctcatttcttttctttttatttgtaggggcggggtctcactttgttgcccaggctggtctcaaactcctggcctcaatcctcctgccttagcctctcaaaaggctgaattacaggcataagctactgtgcctggccattgtgtatactttctattgctagccgttcaagttcactaatggtttctcaggcagtgcctaatctgctgttaatcccattgagtgtatttttcttctcagatagtatagtttttatccctagaagcttgattttgggtctttaaaaactcatctacatctctgcttaatttttgggacatacagagcacaatgacagtatttgttgtaaggtccttgtctgtggattctggtgtctgtgttaggtccggatttgtttccgtcagttgatcccggcctctccgatcatggatcatattttcctgctgcttttcatgcctggccctcggaccgaatgccagacattgggattcgtacctcgttgggtgctagaaacttttgtaatcctgtaattattcttgagcttttttcagggatacagttaacttggagacagtttgatcttttggtgtgttgcttttaagatttattagagaatcagagagctgcatttagtctaggtgtagttattcccaatactgaatcgagacctgacagactgttctacctcgtgccccatgaatatgaatttttcccatctgactggtagaaacaggtactatttcaagcttgctgtaaacacaggcatggttccctctggccttctcagatgattctcaccctggcctcagatcgtgtccacacacacacacgggccaaccaggactctgctgactacccaggaaacctgccacccatttctggagttctctgtgtacagccctctcttctctgctactctgtccggccagctagacggcgatctccccagactctcggcccccatttctgcacctcgggttctggcaggccccctaagcccttgaggcactgagctggtgcagacccactcgctcgctttcctgtgcacagcaggcgctacccctcattgaaaaccatgcgtctcacgtattttctccctttctggtggggggagggggttatgttaggtgttagggtgaacctggtctctgttgctccatttgtccggtacgtagttttaaaagttgaatatttttgcgaggtgtgtccttaaaaacaaaacagcattctcctgcctcacttttctttggcctctgactcctgtctagagacagtctgtttcaaatctcacagctgtttcttctctgtttgtctccatatttctaaataacacatttgtgctgctcttcgttaattttttcagttgaaacatttgtttattaacttcacgctatgggagattagaatgtggtgctctctcttttttttttttcttttttaagagtctcacactgtcacccaggctggagtccagtggcgtgatcttggctcactgcaacctccgcctcctggactcaagcaatcctccttgcctcagcctcctcagtagctgggattacaggcgtgcaccactgcaccctgctaatttttgtttttatttttttattttttgagacggagtctcactgtgtcgcccaggctggagtgcagtggcgcggtctcggttgactgcaagctccacctcccggattcacgccattctcctgcttgagtagctgggactacaggcacccaccaccatgcccgggtgattttttttgtattttcagtagagacggggtttcactgtgttagccaggatggtctccatctcctgacctcgtgatctgcccgcctcagcctcccaaagtgctgggattacaggcgtgagccaccgcccccaaccgtatttttttttttttttttttttttttgtagcgatggagtctatgttgtccaggctggtcttgaactcctgggctcaagcaatccgcccacctgagcctcccaaagtgccaggattacaggtgtgagccacagcgcccagcttagaatgtagctctcttatacctctcttgtccctgctgtccacatggaagaagtagatgttaatatcgattagctcaatatttatttatttatttatttatttgagatggagtctcactttgttgcccaggctggagtgcagttgcatgatcttggctcactgcaacctccacctcccagttcaagctatcctcatgcctcagcctcaccagtagctgggattacaggcacacaccaccatgcccagctaatttttgtatttttagtagagatggggtttcaccatgttggccaggttggtctcgatcccctgacctcaagtgatccgcccaccttgacctcctaaagtgctaagattattggcgtgagtcactgtgcccagcttttttttttttttttttttttgagatgaagttttgctttgttgcccaggctggagtgcactggaacgatctccgctcactgcaacctcccccgggttcaagtgattctcctgcctcaggctcccaagtagctgggattacaagtgcccgccaccacgcccagctaatttttgtatttttagtagagacgaagtttcaccatgttggccaggctagtctcgaactgctgacctcaggtgatctgcctgcctcagcctcccaaagtgttgggattacaggcgtgagccaccgtgcccggccaagatttatttatttagttatttggagacaggttcttgctttgccatccaggctggagtgcagtggctcaaaaagggcttactgtagcctcaacctcccaggctcaagtgatcttcccacctcagctttcccagtagctgggagcgtgaaccaccacgcccaactaatttattttattttattttattttattttattttattttatttttttgagacgagtctcactctgtcacccaggctggagtgcaatggcacaatctcggctcactgcaacctccacctcccgggctcaagcgattctcctgcctcagcctcccgagtagctgggattacaggtgcccgccaccacactcagctaattttttttatttttagtagagacggcgtttcaccacgttggccaggctggtctcgaactcctgacctcaggtgatccacccaccttggcctcccaaagtgttgggattacaggtgtgagccaccgtgcctggccccaactactttttatatttttttgtagaaacagagttttgccatgttgtccaggctggtcttgagctcctgagttcaggtaatccacctgcctcggtctcccaatgtgctgggattacgaacgtgagcccctgcagggggccgacatcaaaatttaaatggccagtcagattgaagtttttctatgaaacatatcttgctttattaaaaatttaaagttttcaaaacatacttgtagaaggcaattttcaaatggttgttatgttttcagatatttttagtaatcagaacaacataattttattgttttactaatcagccaatttttgaactaaatctgaagtcactaagagatgatggtcaatcatgaatatttggaaaaaaatttgtgatataatttatagaaaagaaatgttcagagtgtattgaataattttaataacatataactaattaagtacatatattaactaattataactgtgacattgaaaatataaaatcgactttaagctggtcagcatcaagaagctggaagatgttcatgtggcttatttgaaatcttccgctgtgtatctcctccttcccaaatgatttctcagtaggaagctatgtttgaactcagagaaggagctgtttcttaaaaattaaactgtctctgctgctcccaatagacaaaggtgcttagctggttcccactgaagtacactaattcactgtcttaatttaaatttaccaatatatgcggggcatagtggcccatgcctgtaatcccagcactttgggaggctgaggtgggcgaatcacctgaggtcaggagtttgagaccagcctggccaacatggtgaaacctcgtctctactaaaaatacaaaaaaattagctgggcatagtggcacgcgcctgtattcccagctactagggaggctgaggcaggagaatcgcttgaacctgggaatcggaggttgcagtgagctgagattgcaccattgtactccagcctggacaacaagagtgaaactctgtctcaaaaataaataaataaaaataactttaacaacatagttcttcaattagtccataactaacttttactattagtagggttttcacttaagggtaagtggaattgaacccagtaattcttaggctggaccttaggtggatcacctgaggtcaggagttcaagaccagcctggccaacatggtgaaacgccgtctctactaaaaataaaaaaaattagccgagtgtggtggcgggcacctgtaatcccagctactcgggaggctgaggcaggagaatcacttgagcccgggaggtggaagttgcagtgagccgagattgtgccattgcactccagcctgggcgacagagtgagacttgtctcaaaaaaataaaataaaaacaaattagttgggcgtggtggttcacgctcccagctactgggaaagctgaggtgggaagtaattcttgcatcctgtcttcgttttcctacctggaactgagtcctggcctttgcctaagtgagataatggaaaggaaaggaaagttggagaatctcaggtctggaccttagcagtgaattcagcacaatcgcagaatgttgaggtagaggaaactgttgtagagatcagttgatcagtttttaatcattaaataaaaacgtgaatgaggcagtgaagtaacttccccaaggtcacacaatgggttgctacaagaaatgagaatgagcatttgtcatttcccagtgagaacagtttccattgtgcccggaccttcaaagattaaccttcataccaaagtttttgcctacttgaaaattgtatttaagtacatagatcgtgtgagtgagtctactgcgggaatgttatatacataattaaaattatctctatttcacatttatatatttgtccattaaaacttgcataattaaataaatgtaaaatataactgagataatcagacatctgttttctttaataaacattaatcttgaatagataatatggttaaatgatttcaaaaagataatgtagttacatgatttaaagttatagctaccgaattgtgtgtgcagagaaatcttactcctacccttgccgcccctgccacccactgctgccctctagaggtaaagttttcgtggtttctttttatccttcaggcgtttcttcatgagaatgtaaccaaatacaaatatatattctcgttccgtactccactttgcctacacaaaaggcagcatactgtgtacactatcgtgtctttttctcctgcttttacttatttattattattttaatagagatgagacctcactatgctgttcaggctggtctcaaactcctgggctcaagcgattctcccacttcagtctcccaaagtgctaggattacaggcgtgagcgctgcgcccagccatatcctgtttttttaaagttttctggccaggtgtggtggcccccgcctgtaatcccgacactttgggaggccaagcttggcagatcgcttgagctcaggagtttaagaccagcctgggcaacatgacgaaaccctgtctctaccaaaaatacagaaaattagccaggcgtggtggtgtacacctgcagtcctagccacccgggaggctgaggtgagaggatcacttgagcctgggagaaagaggctgcagtgagccagggctgtgccactacactccagcctgggtgacagagtgagactccatctcaaaaaacaacaaaaaaatttttttttggcctagagataatcccatatacttgtatatgcttagagatcttttttttttcttttttctttttttgagacggagtctctctgtcacccagggtggagtgcaatggcgcaatctcggctcagtgcaacctctgcctcttgggttcaagcagttctcctgtctcagcttgcctagtagctgggaccacaggagcccaccaccacgcccggctaaattttttatatttttagtagagatggggttttaccatgttggccaggctggtctcgaactcctgacttcaagtgatctgcccacctctgcctcccgaagtgctgggattataggcgtgggccactgcgcccggccaccggctaatttttttatatttttaatagatatggggttttaccatgttggccaggctggtctcaaactcctgacttcaggtgatctgcccacctctgcctcccgaagtgctgggattacaggcggggaccgctgtgcccggccaccgttttagtttttacactgaaattattcatgctgcttctgtcttatactgttgtgggttcttgatttatggtgtttcgggcttcattttcacacaacttggaatgtgcgggttttctctgttccctggtttcactgaagatgtcgtttctaatgagagatgtgtatacgtctgtgtgcacgtgcatgtatgtgtatgcagttggcattcattcctgttgctctgtattggtttttagagtgggaagatgtggggctaggccatcattatgctctttctagaactggaacctactagatattaatttttatttacacaaattgtaatttgatgctttaaattggagagggaatcgggtaaattattcggctaaattattaaattgacacatcacttttttttgcagtagtaacgttttgttaaaatgagcgaatttgttatcacattctcagctttcaggaaggtgagctgagacaaagcaatgcttagcatttttctgaaacctttggatgcagtcaggacaagagagaggtgattgtgcccagctttatcacctctggccaggtttctagtgtttgtgtgtgtgtgtgtgtgttgtatttaattgaatgattgctttggacattttctgttttgggggcaaaagtgtttatagtgaagatgggctgggctcagtggctcataccttcagtcccaacactttgggaggctgaggcaggaggatcgctggagaccaggaattcaagattggcctgggcaacatagtgagaccctgtctctacagaaaacaaacaaaaaaattatccaggcctgatagcacactcctctagtcctggctactcgggaagtcgaggtgggaggatcacttgagcccaggaggtcaaggctgcagtgatctgtaatcacaccagtgcactccagcctgggtgacagatcaagaccctgtctcaaaaaaaaaattaaaaagaaaaagaagatggagatgatgaaaggattgaaggatacttattgcttagtcagaaatacagggctatgggccgggtgccatggctgacacctgtaatcgcagcactttgggaggtcgaggcaggaggatcagttgcgcccaggagttaaagatcagcctgggtagctgtagagacaaaagtagtctctacaaaaaaaaatacaaaaaataatccaggcgtgatctcgtgtaactagttccacctgccggggaggccgagtcgggggattgcttgaggccaggaggtcaaggcctgcagtgagctatgatcatgccgctgtactccaacctgggcattggagcaataccctgtctcaagggggaaaaaaaaagaaaataaacatagggctatggaaaaatattcctttatttcagtacccagctccactgggcctttcctttctccagtgtctgttaaagctcagggggataagattgctgttcaggattacttactctcgaatttcgttgtaaccagatcagtgagccagtgcggaaatagctttcttatagtgacttctacctcacggggcatttcaccgcagtgctttctcctctgttgggaaaggacgcacactctgtgctagcgggtggagaactaaagttcattttgtatcctcccagcacctaatccagaacttgtgccatgtgaggtgaccagtacaattaagtctagcccacaaataggcaggaattccaaaatgtgcgttgaaattgtcttggcggggcacggtggctcactcctgtaatgccagcactttgggaagccgaggcgggtggatcatttgagatcaggagttcgagaccagcctggcatacatggtgaaaccctatctctattaaaaatagaaaaattagccaggcgtgatggcgggtacctgtaatcccagctacttgggagactgaggttgcagtgagttgagatcgcgccactgccctccagcttgggcaacacagcgagaccccgtctcaggaaaagaaaaaagaaattgtctgatatttatagaattttcaaagtgtgagaaataaaacttcagacataattcgtgcttcatactatattgaattagatgattttaaagtctcccgtatttaccactgtatttttgtctgcgtatataagttccatgcacctatactatggctaacaatattttactttgactaaaatttgttacacaatacttaattattagtgttacttattattgaaagacattagttgaaatttctttcagcctgatttcatccattttctgccaagaggcaattgtaaattattggattgactcttctacatattgtttgtagttgttaagaaagtacttactggtagaagttgaattttttgttgcccttattctccattgtctgtttagcgaatttttctctgcgatggctcacttaaccattataatgataaaaatgataggtgtgagtgcaaataatttgaggtgctaagagtctgctctgaaatatcctgtttcggccgggcatggtggcttatgcctgtaatcccagcactttgggagattgaggtgggcgggtcacctgaggtcaggagtttgagaccagcctggccaacatggtgaaaccctgtctctactaaaaatcacaaaaattagctgggtgtggtggccagcgcctgtaatcctagctactcgggaggctgaggcaggagaatctcttgaaatcgggaggcggaggttgcagtgagccgagatggcgccgttgcactccagcctgggtaacaagagcgagactacgtctcaaaaaaaaaaaaaaatcctattttccccctaggtcaaagccagtgatatgtaaagctagcatagagcaaaagagtctgagaaccatgatgttgacctgtcttattagaatggtttgatttgcaggtgacacaaagcagaagatgtgtcagaagttaagtctctgcattactgctttggggtgtaatttaatttttagaaggatttttacttagctgtagactgatttttctggggtctcgtggccccttgccattcacaacatgcactgcaacatgttgctatgtagaatgcaccggattcttgccgtccatttggctccgggctgtctctcgtctcttgtgccagatttgcacatctggtccagagcaggagttaaggattgctctagtaagtggattagtagcttttcctaattaccagatctcacaactagagttgcggctgccagaattggtcgttcacagttaacaattacctagatgatgatgaagtacatggatctagtcataaaagcctcggttcaagcagatgtcctgcttcccagctgtgtgatttgagccagttacgtggttcctctaacccagcgttctcacctgttaaagggtatgataatagtgtctacatcctagggctggcaggcactgtagcaatgcacgtacctgcactctcctgaatgcagtacctgaagcagggtgagcactcaagaaagggtagctgtaattcatacgtattacagggcttgattgttaaatattctgtgcttcatggactctcagaatccggggatcacaagactgtactgttacattatgtactgctaaaaggaagtgatggtaagacattaatttacatgttaaaatgtgaaaaaaatgtggatcttagaataggtaaactaaggtaagtcacatttttaaaaattgtggtaaaatactacctaacatgaaatttacatttgagcagttttaagcatacagttcagtgacattaagtccattaacgttggcgtaagccatcatcaccatccatcttcagaactttttcatcatcccaaaccgaaactcttgagcctattaaacactactccattccccactcccgccattctctggtgacccctcttctactttctgtccctgggaatttgtctgttaggtacctcttaagatttagctacatttttatagaaattgaatctatgtgatcagcaagatcagatgaccacatccttttcaacaaagttcttaagcagatatgatctcagcaggggattttctagtttagtggttttggagatgatagaagagagggaggaagtcggagggagtgtagcaggggcttatgtatttttatggtactcttctgtttttgaatgtttacatctttattctcttgaataatataattcatgaagcaggtaaagatacagcttttgttctatttctttccagccacttagccccaatactatttcctgagcaactcatctttttctattgattttaaaaaaggtccactgcagaattttagactgttccttcacaagatgcattgtcagagatgagcagttttcctttgctattttgtgtgacgctttgtaaattcagagataatggaaaagccaaaatgtaaacacaaaaatttcactgtcaataatctggctctttttctatgtaaataaggtctctcaatttttctctccataggaagaactaaacagttctatttaacctttttaattttatgctaaatttattttactctaatggcacaaccacctctcatttagttgtgccagttaagagtaatattggcagaagtaaattaaatcagtgtgtaatgtgcccgtttgagttaggaccttggaaaacgcagcaggaatgcgaactcagcagttggagaaggcagagacagggtggcaggtgggaagccctcccagccgtgggtaccatttttgttctcagggcactctaggaaagttttttgagttgcctttgtgtgctgcaagtacccttggtgagctgcccacatgaggttgacttctgccttttagagccaatcactaaggcaaagtcaaattccataaatctgttatttcacaaaatgaggcatattttacagttttaacattcttcagctccatcaacatttgtgtaaagagtgatggcaaatacatgctcttatggtggcatttcttattttctgcttgagacacgctcatttccccccctttacttttaatcttcctgtttccttgacacacctgcttccgaaccccattgtcatctctccccgctgtgacagttcaccagcacttcatggtactggagactctttcaacttgccttttccaccaactgtcagttgcaaaataaggttgctttgtttgggagggagagggtggaatcctttctgaatgtctcctgttcctttgaagcaggagcacttcagagacaactgaactgcttttaggtttttcttaccacccagctttttcttctgattgatcctgccgtgaacacacggttctgttgatgacatcgatttgttgctatggaaatagtggtaatgtcacagattcaacccagtgactttactgcaggttgttgcaggagaaatgggcaaggctttaggggagaacctcattaacactgaaggctatcaattctaagcaggtgaaaggtagatggagccaaccttttgtgtaatgaaaacaaaaagtgaacccctagcaaattcaccgagtgccatggaatgcctcagcacgaattctaatccatgggagtctttgacaaaataaaaaatttacactttcccagagcattccttctacccaagtttaaatctcttaacccaaatcctttgcactaaaacggggtttcccttttgatcttcaggactcgggcagccgcaagtagctcctccagcgccagcagccagcccagcagcaagcagcaggccccagccgcagaatggaagctcgggaatgggtgagatgcctcacggggcgtgcgctgaccaggggtgtcagacttcggaatcatgttttgaagttgaatctgggactaaagggagttttccaaatgccattcattacagggttgtgtcttggaaagaataattctgattcatattttagagtatgtgattgaaaaaataattaaagattgtctttttttttttttttttttttggaagtagggtcttgctctgtcagcggggctggagtgcagtggaagcatcacagctcgttgcagccttaacctcccaagtagctggtactatgggcgcatgccaccatgcctggctaatttttttgtagaaatggtgtcttactatgttgccctggctggtctcaaactgccctggcctcaagcagtcctccgtccttggcctcccaaagtgctgggattataagtgtgagccagggtgtccagccaaagataatcttaaagatacttaacagccagacttttaaaaaagatcaaattgatacattcttctctgttagtagttgaccaagtagtttcttcgtttcccacatcatcaggttttacaccctctgactttgcattccttttaagttcttgccttttaactatccaggacccacttactaagtttggctcatctctctccgagtttcctattttgggcctcgtgggtgtttatcgtttgcttgaagacagtattacttatattggtcataggttctccttctcaatttcatggatgagaaatggtttcttcatttacttttctctgcagcaggtcctaagaggcattaatggaatcattttgtttactttctggcctttactttaggaacctcttgatctgggaagtcaccgttgaaaatttggatttgtagaatgtggttggatttatttttagaggtccttttttctgtcacggcttcacatacacctcctctcctcccctcaactattagtttctatttttcagtgctaagattctgagaaaagcaaggttaagatgtcactgatgtttctgtgaaactctcaggactttcccccttgccctttgttgtttttaatctaccttgcacgatccgtctacctctctcgctcttgcacgttctctctcttgctctgtctctccttttataagaggatctatttatacacaactcaaaaattacatgctgttggccaggcttggtggctcacgcttataatcccagcactctgggaggccgaggtggacggatcacttgaggtcaggagttcgagactagctagcctggccaacatggtgaaaacccatctctactaaaagtacaaaaattaatcgggcatggtggtgtgcacctgtagtcccagctactcgagaggctgaggcatgagaatcatttgaacccaggaggcgtaggttgcagtgagccaagtttgcgccagtgccctctagcctggacaacaaagtgagactctgtctcaaaaaaaaaaaaaaaaaaaaatatatatatatatatatatacacacacacacacacacacacacacacacacttttgaagagagtggtgaaatagactctctaaagtggtaaataatcatttccttaggcttatatacaaatagtacgttattcctctccctccctccacagaattatttttctggttgtctatctttgccttatgttaaaatatatttttaaaaatctgggctgggcacagtggctcacacctgtaatcccagcactttgggaggccagggcaggaggattgcttgagcccagcagtttgacaccagccaaacatagtgagacccgatccctctaaaaaaatctttttaagaatcagctgggcgtggtggtgcacacctatagtcccagctactcaagaagctgaagtgggaggatcgtttgagctcaggagtttgaggctgcagcgagctaagatcgtgccacctgcactccagcctgggggacagagcaagaccttgtctcaaaaaaatgaaaatcagttaatgttccctaaactatgtagtgaaaggaaatgaactggatgtgtactgaggagaagctacccagcatgaaatagattggatgaatggatgcttgtgtgtgttttataaaattatatattatgtatgggtatacacatgtattctacaaagtacctgtgtgtccttacacgatcttgaggtaattactattgtgtgtgtattgatctctctcgactccccagttagaaaatttcaacacagaaacactcctatgtatattttttactaattactacgaatgcctagaagggtgtggcacatgccgtggaaacccagtaaataaatactggatagatggtgtattgatatttttagccaaattctattctgaagaaatgttttgatgtagagggtatgaaatcactgaactaaattatattttctgaatttggacgttgagttttgcagatacgtggtgcgtataaaagaactcacctgattccctgttctttcccagcgcagggcagctgcttaggtttggattaaggaggcggaagggtcttagtggtcacccacttaacatatcttgaccaaaaactgattcctgccctttgcacccgacgaaactcattcttacagacttcattctagacttgctagtccttcagacgcattgagatctgggagttgtctggggatttggaggcgatctatttgtgataggtcccttacatcctgtctttcttcatgtgactagtgccttgccatcagttttaccagttacaaaagttgattttctttttctcacccattatcttgcccgttgaggcaagagaagtgtttaagagggcggccttcagaaacagcagtgtctggattcgtcaccattattactttgacctcggggctgacatcagcaaacatagcagtgagctgctgtgtgcgcagccttcatcctagattgcttttgtagcctccagcctcagtctctatttgatctgcgtatctcttgcatataaaaaggaaaagctttgcctctcatgttatatgatttcactagtggcacctccaaaatttagagttattgtaaagcttactataaaaaagctaagtagaatagtaataactccttttcgtttgcgtttgtttttaaaggttctactgtttctaaggcttatggtgcttcaaagacatttggaaaagctgcaggtcccagcctgtcacacacttctgggggaacacagtccaaagtggtgcccattgccagcctcactccttaccagtccaagtgagttgttgcatagagtaagttcagagtgtacttatgaaatcggagaagctattatggactcttgagttatttatgcgtgaacttcagggtcaccaccaaataccaccaaatagaatgggtttactcttttttttttttttttttgctgaggaggaaaggggtacaaattgtggcaaacttttaactcttgttggaaaatatagtaacaatagcaatctgccatagcctgtggggtttcattcattttgaaagaatttgaaattaaaaatacttaatgcttaatcagttgatagtcttatgagtaaaaataaatatttctgataattcaaaaggcatttaatcttctcctataaacaggtgacttcgtctttggtttagttggctaaaataatctgcactatttgtattaaacacatgaacataccctgaacataaatttcttttatatgacttttttccaccaaaaattaatttgaagccgggcgcggtggctcatgcccgtaatccccgcactttaggaggctgaggcgggtggatcacctgaggtcgggagtttgagaccagcctggccaacatggtgaaaccgtgtctctactaaaaatacaaaaattagccaggtgttgtggagcacgcctgtaatccccgctactcaggaggctgaggcagaagaatcgcttgaacccaggaggcggaggttgcagtgagccaagattgtgccactgccttccagcctgagtaacagagtgagattccgtctctcaagataaataaacaaaataaagtaatttgaatagttaaaaattagagttcttttttcagaatccttccagatatgtttatatttattcttcaatactctgtaacgtaggaaagatatttttccctgtgaaattataagtggggtacctaatgtgccctgtgcctcctttttccatgcttctctctaaggtcatgctgcttcagtgtgttcttcctgatggtccaccaacatcgtgtattctattcagggtgtgttacgaatgagacagaagtgtaacaccagttatatcagttcccataattgaaaactgtggcaaaatataattgctggtgttactgtattttccagcttagaacctttcattaaggggatatggttgccttggtgatgctttttggagaagggagagagtttataaatttacttatttgacaggagaatgagttagtattaaatcactttgcatgttttactatttgcttattctgtaaactgtcaaacccatgtgtcatcttggggttttaattagctggattaaaatacaggttggaaaacggaatatgcgtaagacgagaaaggctgtaggaagatgatttcttacttgatcttttccaaggaagaccccatacactaatatgatcgatttggtttgtaggtggaccatttgtgctcgtgttaccaacaaaagtcagatccgtacctggagcaactcccgaggggaagggaagcttttctccctagaactggttgacgaaagtgtgagtgtttgtcatgctggggagtgagggcagtgggctcgccgggaaacagaaggctcagctctgcggagggcagtgggctcgctgggaaacagaaggctcagctctgcggagggcagtgggctcgccgagaaacagaaggctcagctctgcgggcctatgaggtgaagaataatagtaggccagagagaagcatgattgttattgtgcttttccctctgtcatagtcttttgatgctgtctggagtagagggttaaggtcataaataaaatctttgatcttaaatgacagcgtttgtagcagtagaaagtagttttctaaatatataagtagcctcctgggcaggagaagctggaaacagtctgatttgctggcaggtgtactggaagcactgggaggtgatgcctgcttgtgagcgccgtggagctttgggacacagcagaaggcacacagttgtgacctcgatatgggagtggttttgtgggaaatgggttctgactgtgcagattctctatttgctttatttaaactaaacaaaaccatgacgatgagacaaaattcctatgccatggaagtacgacagtcttgatagctgttaatcagtccattcgttttgctaataattcctgaaattgccgggtgtggtggctcacgcctgtaatcccaacactttgggaggccagggtgcacagatcacttgaggtcaggagttcgagaccagcctggccaacatagtgaaaccccgtttatactaaaaatacaaaaattagctgggtatggtggcaggtgcctgtagtcccagctacttgggaggctgaggcaggagaatcaatcgcctgaaccaaggaggtggaggttggagccagccaagattgcaccactgcactccagcctgggcgacagagtgagactccatctcaaaaataataataattcctaaaatgtacttcagcattcttttcaaagtgctgcagatttcctgtttgttcagactcccaaatagggagaaaaaaatagatgttttttttggaagttgatataacacccaaaatgtttgtgtgatggcagaatcaatattagaacctaatttttttttagaaattattgctctaatgtatggtggttggctaaaatttcttgtccacttgtaaattttggctgacagaaaagcaaaagtgaaaatcagatcacaagcaacttgcaaacatgacttactctgacatttttggcaatggctccgaatgtgaagtggtttgtcactgagagggcactgtggagggagccggtgaatcaccccgtggcagcaccttcctcgtgggctctgggcgtgtccctcagtattcaactttttttgtttttattgtcagaataaattaaactcgtcattgccgttttgttctgttctgtttctcagttgaggctaatgcagcatgattatgggatcggctagctgaaattctcattcttcagcggggccagtgacttcagtgtgtgactgtaaaatgcgggttcctgggatgtccgtagccctctctggaccctgtttgtgcaagggccactgctctcaagatgtcactttggtgctagggtggcctgtgttctatcccagtgtcacttgggtgctggggtggcctgtgttcaatcccgcagccctaacctgcccacgtgcttctgcagggtgaaatccgagctacagctttcaatgagcaagtggacaagttctttcctcttattgaagtgaacaaggtatggccgtgctgactttagaactgacaccgcctgggggtggagtgcggatgaaaagacgctggcccaggggaggggtgtgtggtggcagactaggggtttctgtccgatttgatggtagtctcaggttctgtggcttggcctccttcgcaggtgtattatttctcgaaaggcaccctgaagattgctaacaagcagttcacagctgttaaaaatgactacgagatgaccttcaataacgagacttccgtcatgccctgtgaggacgaccatcatttacctacggttcagtttgatttcacggggattgatgacctcgagaacaagtcgaaagactcacttgtaggtaagctcgtgtatgagaaggaagagcagggatgactagctttctttgcagtgtacggggtggtgtcaggcttcagtgcttgccgttcatcatttgctggcgtcggaatgggagtcttgaccacctcctgctaacacgtgcatgtgttttagacatcatcgggatctgcaagagctatgaagacgccactaaaatcacagtgaggtctaacaacagagaagttgccaagaggaatatctacttgatggacacatccgggaaggtggtgactgctacactgtggggggaagatgtaagtgctgggatggggtcttcaacacgcacaggacctcctggggttggggcgtggtcttgtcctataggatggggccttcagcacacacaggaggagctcctggagttgggggagggagtggtcttatcctataggatggggccttcagcacacacaggaggagctccaggagttggcggagggggcatcttgtcctataggatggggccttcagcacacacaggaggagctcctggagttgagggagggaggggtcttgtcctataggatggggccttcagcacacacaggaggagctcctggagctggcggagggggcgtctgttcctataggatggggccttcagcacacacaggaggagctcctggggttgggggagggaggggtcttgtcctataggatggggccttcagcacacacaggaggagctcctggggttggcggagggggcgtcttgtcctataggatggggctgttagcacacacaggaggagctcctcgtgggggcggttttgtcctatgagttgggggctttcaccatgtagatgggaaggattgtgctgtctggtaagtatttaaaatcctttatcttacttctgtgagatttgctgtgattcaagctttacgcggggaaatgctctttcccctaactctaggaaagcagtgatagttttgatgtgtctctgagtagattctcatgtgtgaggtctgtcttgtatggattccatgtacgctgattacattcactctactattgaatgtttgccttgttttctataaaaatcttctgtgttcttcctgctagtgacacttgtatatgtctggtgtttcttttacaggctgataaatttgatggttctagacagcccgtgttggctatcaaaggagcccgagtctctgatttcggtggacggagcctctccgtgctgtcttcaagcactatcattgcgaatcctgacatcccagaggcctataagcttcgtggatggtaggttttgtggggctaaacaaagggttacttgaggctgggctttgagaaaagctggttacaatcagcatgggagctttctgccaagcagaagccttcgtccctgagtggtgcagcttccgtgtttcttgaaggcattatgccttctgtgaggagggctttaaagcccttaaacggacaaacctgtaatcccaggacaaacctagagagtcggaggaggcaattagcatgtaagtgctgcctgctgacctcgatcctgccaaaggaggggacggccaggcttcagcagcggtgtgctgaaggcgcctttctttccagggtttaggctctgggcctctgtggcgtgggggaacacatgctttctttctctgtcaagtctttggtgccgatcacatcttctagtgtgtattcactagactctgatcaagtgtggtgagaacaatgggctttttgttaggattagattgttattcccaaagcactcaagggatgaggagagcctgttaaaatctcctcactgtatctagctttttaggacattcaaactctgtcttaaaagagtacttcaaactgagacacaggatgcaagaattgatgtggtcagggaaaacactttcacccaagcttcaataattcccatagctgtagtctatgggggggaagtgtgtcagtttccagctgtgtcttaggatttaagcagctaaagaatgagctcattttacatactcctcctttgttttgagtcatttaaaccaatggcactggtgtttgaccagtttcatgaagcatcttctggaatgttcatgtcactgagccatcctcatgagtagtacggtccacacgtatctgccgaactgcagggcccgttcatagtctgaccagaactagccacagatttgcttttttcttattgcttgattttcttttaggctctggagttcgactccaggttaattgcattcccacattaaaatcgcattcccacattaaaattgcattcccacattaatgtcttcatcttttacttgtcaataatcatgatcccagtcaacataaaaagcacggctgtccccagaataaaataacttggcattgatcaaagacaagctcagtgcatacatgatacctggacaaggattagagatgtttagatcttggctataacaatgcagagtttttattgtaagaagggccgccttgactcctgacgagtgatctttggtggcaaatgtctccttggagcttttgaaaccgtgaacttgtgtagctagtagtggtgaaacagatggatgggccttgctgtgcccctgtgagggatttagccgcttacctgacaggagaaggcagctgtctgcagctcagggtaacatccattctgttagatggtctctgtttaaggaacctgttctttgtgtggttacccaccttgggatggtatttggcctttcatctccggccagctcctctccgccaccactgtgttcccgagccactttctccttggccccttttccttcatatcaattgatgtgtgatcaagaagtacaatcagttttcataataatttaatacaaattaatttagcttcgatattagcaaaagtaaaatttcactaagaaggtaaatctacaagaaaaaagataatgccttctgataagttgctctggtttataaaatcttttgggccaggcacggtggctcataccttaattccagcactttgggaggccgaggtggacaattgcttgaggccaggagttcaagaccagcctggccaacatggtgaaacctcgtctctacaaaaaatacaaaaatcagccgggcctgtagtcccagctactcggtgcgtgcctgtagtcccagctactcgggaggctgaggcacgagaatcacttgccaggaggtggaggttgcagcgagccaagttggtaccaccacactccatcctgggtgacaaagcaagactctgtctcaaaacaaaaaaaccacttttggcttctgtatcaggcataggaggccttttatggaaacacttttgctaccacggtatattggctgtccgtttccacactggtacatttcggtgatgatcaccacgcagctgctgcctgagaatgagcattagcagattaaaggactaccccagacggccactttatagcttacgggttgttgactttcccagtttctgattttaggcctggggtggtctggccactgccaatatgcaaggctagtttaagaaaagattctttggtactttggcactgattctcttcaccactggggggcatcaaagcaactgagattcaaagaaaggtcattccgtttcttcagtagactttgggccaggagcagtgcctcacgccctgtaatcccagcactttgggaggccgagggaggaggattgtctgagtccaggagtttgagatcagcctggccaacagagcaagaccccatctcttaaaaaaatttttttttcgagacggagtttcggtcttgttgcccaggctggagtgcaatggcgccatctcggctcactgcaacctccgcctcctgagaattgcctacaagtgattctcctgcctcagcctcccgagtagctgggattacaggcacccaccaccacgcccggctaattttgtatttttagtagagacggggtttcaccatgttggccaggatagtcttgatctcttgacctcgtgatccgcccgcctcatcctcccaaaatgctggggttacaggcatgagccactgcgcccagcctaaaaaaaatttttttaatgggcctgggcatggaagtcccagttacttagcagggcaaaggtgggaggatcactgagctcagggggtcaaagctgccttgagccatgattgcatcattgcactccagcctgggtgacagagtgaaactctgacacaattttttttaatttaaatattataaaaaatatataattacgaagataccagcttcagccgacatgaccgtgacctgtgtgaaagctgggcgggtggtgggaaacctgtgtctgtcgcgtagcagcaagttgcatgtggagaagcagaagcatgtcacatcaagcgctcgtcatcgttattcgttcacgttttcaggtttgacgcagaaggacaagccttagatggtgtttccatctctgatctaaagagcggcggagtcggagggagtaacaccaactggaaaaccttgtatgaggtcaaatccgagaacctgggccaaggcgacaaggtacccagcattcctaaccaccttcacaaagggctgtaaagtgtgcagaaggatggatttagaaacttggtttccagcaccagctgtcagagccgtaattcttacccggggctgtgacctgagcgtggcatgggggttgagaatcactggcagagggaagcagccaggtgtgctcatgggaatatgtgttacccctcaggggactggaggcaggagagtctgaagaactcttagagtcaattcctagagggatcttggagcaggggtgacagtcaagctttgtggtataatatcacctgctttcgggtccacgtttctttcctgtgatccttcctgcaaatttaagcgcccacatatcaaaaagatgttttttgagatgagcgttagtccgcctcaggtcagacatgaggcagtttcacgggtgctgttcctggctgtagaatagtgtattaacctcataggctgagagctgccggcattcccggacaaggattggccctgacatttgacttttagttgcagctttttcctttcagtgtttgtatttaatgaccctcctcccatcttgatctaagcctgtgttctgccagcagtttagtatttagatcatttatttctcctttacgcctgctcttttattttcatcatatacagtgtaggtttcattcctcctgtctcatttcactgtatacccttatccatcattgtcaacagcagctcttaagtgctcttatagaacatctcaagaattaaacactggacagatcctcgttgtcctgtcatgggacacccactctttcggttctctgtaatcccagctacccaggaggctgaggcaggtggattacatgagcccaggagttcgactgagcaacatggaagaccccttctcttgaaacaaaaactttattgctgaaaaatgctgacaatcatctgagtcgtaatcttcttgctggtgggggtttgtttcagggttgatggctgagcagtcacggcgatggttgctgaacatcggcgtgtctttggcagtttcttaaaataagacagcagtgaagtgtgccacattggttgactcttcctttcacaaaagctttctccatagccggcgatgctgtttgacagcattttacccacaggagaactttttcaaactggagtctctccctctcaggtcctgtcactgctttatcagccaagcttatgcaaattctaaatcctttgtcgtcatttcaacaatgctcacagcgttctcaccacaagagatttcatctcaagaaagcactttccttgcccatcgtaaggagcagctccttatccgttcaagtttgatcgtgagattacagcagttcaggcccattttcaggctccatttgtaattctagttctctcgttattttcgtcacatctacagatccctcctccaccaaagtcttgaagcctcagtgtctaccttgagggttggaatcaacttgttccaaactcccgttgatgttgggattttgatctcctcccatgaatcatgaatgttccttttttttttaacttgagacagggtctcattctgtcactcaggctggagtgcactggcttgatcacagctcactgcagtctcaacctccccaggctcccaagctgggactacaggtgctgccacacctggctaattgtattttttgtagagactgagttgtgtcatgttgcccaggctgctctcaaactcctgggctcaagggatctccctgcctcaacctctcaaagtgccaggagttacaggtgtgagcgactgtgcccagccaactgttcttaatagcatctagaatggtgaatccttttcaggttttcaatttactttccccagatccatcagaggaatcactgtggcaactatcgcctcatgaaatatgtctcttagacttaaaaagtcaaaattactccttgatttgcatgggctgcagaatagatgttgttatcaagcatgaaaacaatattaatctccttgttctgtgcatctccattgagccctcgggtgaacaggtgcattgtcaatatattaatctccttgtactgtgtgtctccattgagcccttgggtgaacaggtgcattgtcaatatattaatctccttgtactgtgtgtctccattgagctcttgtgtgaacaggtgcattgtcaatatattaatctcctcgtactgtgtgtctccattgagctctcgggtgaacaggtgcattgtcaatgagcagtcatatttttaaaggagtctctttttctgagtagtaggtctcaacagtgggcttaaaatattcaataaactacactataaatagatatgctgtcatccaagctttgatattctatttataaagcagaggcaaagtagatttagcatagttcttatgagccctaagatttttgacatggtcaatgagcactggcttcaccttatagtccccagctgcattcgcgcctaacaggagagtcagcctttcctttgaagctttgaagccaggcattgatttctactctctaggacgaatgttcttgatggcatcttcttccagaaggctattctgtctacgttgaaaatctgttgttgagtgcagccaccttcattggtggtcctagctagatcttctggataacttgctgcagcttctccatcagcacttgctgcttcaccttgcacttttgttatggtgacggcttatttccttaaacctcatgaaccaacatctgctggctgccatcttttcttctgcagctttttttttttttttttttgagacagagtctcactctgtcacccaggctggagtgcagtggtgcaatcacagctcacctcagcctctggagtagctgggactacaggtgcacaccaccgtgccctgacagatttttgtagagactaggtctcactatgttgcctggctggtatcgaactccttggcttaggcaatcatgttgcctctgcctcccaaagtgctgggattacaggtgtgagccactgcacctggcctcttctgcagcttcctgacctctctcagccttcacagaattgaagaaaggtgaggccttgctctgggttaggctttggcttaagagaatgttgtggcttgcttgatattctatctagaccactacagcttactccatatcagcagtaaggctgtttgctttcttatttgtgtattcaaagaagagagacaggaatacttgattggaggatcagtcagcatacatacaacattcatcaatataagttccccatcttatatgggtgtagttggtggcaccccagaacaactacaatagtgacgttaaagatcactgtaggccaggcgcggtggctcattcctgtaatcccagcactttgggaggctgaggcaggcggatcacctgaagtcaggagatcgagaccatcctgaccaacgtggttaaaaccccgtctctactaaaaatacaaaaattagctgggcgtagtggtgcatgcctgtagtcccagcttctcgggaggctgaggcaggagaatcgtttgaccctgggaggcggagatttcagtgagctgagatcatgccactgcactccagcctggtgacagagcgagactccgtctcagaaaaaaaaaaaaaatcaccataacagatatgataataatgaaaaagggccaggcatggtggcttactcctataatcctagcacttcgggaggccaaggtgggtggatcacttgaggtttggagttcgagaccagcctacccaacatggcaaaaccccatctctactaaaaaatacaaaaattagccaggcgtggtagtgcacgcctgtagtcccagctacttgggtggctgaggcaggagaatcacttgaacctgggaggtggaggctgcagtgatcagagattacaccactcactgcaccccagcctgggcgacagagcgagactctgtctcaaaaaatacatatataatgaaaaagtttgaaatcttgcaagaattactgtctttatgtgacacagagacataaagtgagcacctgctattgggaaaatagtgcatttacttgacccaggggtgccacaagtcttcaatctgtaaaaaatgccgtatctgtcaagtgcagtaaagcaaagcacaataaagtgaggtgtgtctgtagttgcagcagagactgtgaccaaatggctgctaaggcctgaaatatttactgtttggctttttacagaagcagcttgctgatccctggcctaaacaaggaaaaggtgaatctaggcctagacacgactgccgtgttttgagcgcgggagggatggttgatcgttgctgcactgggtgtttgtggtccgcattctgtatttcctagatctgtggcctttggagggtcagaggatcgggaggaacaaatctttgtctttcatacagtgttcaagcaaacaggaaaacaatttcacttttaattaacttagtgtaatttaggattaactcttttattgtgaaggaattatctgcctcagaacttggcttattagaacttggcttattaccttcatgggttttgtactcggcacatgtgatttctaaaactacagaatgaatgattccctgtgatcatgtgtaatcttgaggatgtagaaacacttaccacctaaacgtaagggcaggctttgagctgcctctcggtccgatcctgggcgggctcgcgactccgtgcctcatgctgttcttttctcccgaagccggactactttagttctgtggccacagtggtgtatcttcgcaaagagaactgcatgtaccaagcctgcccgactcaggactgcaataagaaagtgattgatcaacagaatggattgtaccgctgtgagaagtgcgacaccgaatttcccaatttcaagtaccgcatgatcctgtcagtaagtagcctcggtagatgagaaccacggttgtgttcacggaggccctcccgtgtgccaggcactgtggtcacaacagtagagacaaagcattcctggtaggaagcccgcagatgagtaggtgtggaagagcttatccatccgctttttcatgccagaaagtggtgttgagataccccagctgattcagtctttcatgcacgtcatacagccatagcgtcagtgacacttgcctgctaactgctatgaagataaattaatttgaaaacggcatttatagacagcactaattgtacttacacagccaatgcccgtatttagtcactttcatgtggataatctattctctagctttagtatagctgacttcagaggaatgtgacggtgtgctgatgtgagattgttgcttttttgcattttaagaattgtttctttctgttttaaaaacctttttaaaaaagttgtaaagttgggtttaaaaaaatttttttttttttttaagaaacaggggtctcactctgttgcccagaatagagtgcaatggtatcatcacagctcatggtggccccaacctcccgggcttaagcagtccttccaccttggcctcccaagtagctgcaactacagctgtgcaccaccacacccagctaatttttaaaattattttattgtagagacagggtctcgctctgctgttcaggttggtctcaagttcctggcctcatgtcatcctcccacctcagccttccaaagtgctggcattacaagcctgagccactgcacccggccttaagatttttattttgttttgttttgttttcaatgatagaactaggcgataatagcagtttaagaaaacagtttaaggccgggcacagtggctcacttttgtaatcccagcactttgggaggccgaggcgggtgcgtcacctgagatcaggagtttgagaccagcctggccaacatggtgaaaccctgtctctactaaaaatacaaaaattagccgggcgtggtggcgggtgcctgtagtcccagctactcgggaggctgaggcaggagaatcgcttgaacccgggaggcagaggttgcagtgagccgagatcacaccactgcactccagcccgggcgacaagagcaaaactccatctcaagaaaagagaaaaagaaaacagtttcacatttttccaaaggatgatttggcagtaatatatcagaagcctgaaaaatgttcatattggccaggcgcagtgacttgtgcctgtaaccccagcactttggaaggctgaggcaggatgattgcttgaggctgggagttcgatatcagcctgggcaacatggcaagaccctgtctctacaaaaagtaaaattagctggctgtggtggtatgcacttgtcccagctactcatgaggctgaggtaggaggatcgcttgagcccgagaggtcaaggctgcagtgagccatgatcgtggcactgcactccagcctgggtgacagagtcagaccctgtctttaaaaaataaataaataggccgggcacggtggctcacgcctgtaatcccagcactttgggaggctgaggcaggcggatcacgaggtcaggagatcgagatcatcttggctaacacagtgaaaccctgtctctactaaaagtacaaaaaaattagccaggcgtggtggcgggcacctgcagtcccagctactagggaggctgaggccggggaatggcatgaacccgggaggtggagtttgcagtgagccacgatcgcgccactgcattccagcctgggtgacagagcaagactccatctcaataaataaataaattaaattaataaatgataaataaaatgaaatgttagcttagcaggacagttctacgtttaggctcattttttgtaaactataaacttttcattgaactaagatgaagaaaatttgttttagtttgtggaaacatcagcctttctgttaaactccacagcgcaatctcccgcacacttgtttgatttgatatttatcacacgtgtgcgtcattgtagttcttgccctgtgtgatgagatgctctttgcttcttagaaggatagcgtgggttaaaggaagtgtgagcccagggtgtgataccgttgctgtgtattgagagcgcttttcacttttaactggtttcgtcaccttatttttcgtcataacattctctctattaaaagccttgtacccatgcaaaatgaagatgtaaaatcgtcaaaatgatgccttaaagaaaaaccactcgtgtttctacaaaggcttttacttcagcaagtggattctttgagatctgctttcttccttgactttgccctgtttaatgttacaccacagcccagtgggagacatttgattgctcatttcctttgccaggtcaatttggtgactgacagaggctcacgggcaggctcttcagttgtctgggtgcccagcagtgacagagccgtctcatggaactcctcctaggaactacagagtgggcaattgaaaatgcagagaactcccccgattcactcaaaacccttcatccaaagccagctgcacctcgacaggaactaatctgatgggcctctctctgtcacccaggctggagtgcagtggctcgatctcagctcgctgcaacctccgcctcccgggttcaagtgattctcccgcctcagcctcctgagtagctgggattacaggcacccgccaccatgcctggctaatttttgtatttttcgtagagacggagtttcaccatgttggccaggctggtttcaaactcctggcctcaagtgttccacccgccttggcctcccaaagtgctgggatgacaggcatgagcccactgcacctggccctctctggaaattattttaataagtggaaaaagaacattaacctctccccatcttctcagtgtgtctttttattatttctttgctgaaataatgtagaattgtgttttttaggtaaatattgcagattttcaagagaatcagtgggtgacttgtttccaggagtctgctgaagctatccttggacaaaatgctgcttatcttggggaattaaaagacaaggtcagccacatattttattataacttctataacttttaatggttctcattctataacactgaccccacacatttttttttttttgagatggagtcttgccctgtttcctaggctggagtgcagtggcgcgatctcagctcaccgcagtctccgcctcccgggttcaagtgattctcctgccccagcctcctgagtagctgggatgacaggcacccgccacgatgcccggctagtttttgtatttttagtagagacggggttttaccatgttggccaggctggtctcgaactcctgacctcatgatctgcccgcttcagccacccgaaatgctgggattacaggtgtgagccaccacaccttgcccaacactggccctctttttgctgtttaatattttttagtttgtttctttttggtattgtttgtatacagtttctcagcctgataattatttaagagctcatctgatgttatctaatcttgtccatttgggatgtgcttaacagtgaaataatgtatataaaagtactttaaaaccaaagcactttctaaatcgaagccacccgtttctcctgttcctattagcacatcagagctagtgtgcctgagatgacttaggtcgggaggtgtccctgaaacaacctgaattattacaggcatgcttttttaacatagtaaataccttccagaaaagttgagtcagatcctggttaaaatgcacgtatgtcaagttcctgggtctgtcctataaaacaataataataaatgcacatataaggtgcctgccatttcagcccatcagatgcaattcttatgcggtgactttcttccgtaaggtaactttgtccatttcatttttataagtttgcattttcacatattaggtttatttaatgtacagaatagattgctaataatgctgaatttaggaaaggtagttgctcaggtaaaacataaggaagaccaataaaagctatgttttctgggccacataaatgggcacctttctgtagatggcttttcccccgatttcctccaaattggttggaatacttgtaaaggccacaaagatgaaaggctttgccatttgttctggtgtgtttttctttttcttcctgtccccagttctgtctgtttgggctctgccctgactctttttttaaattgtccatgagagctctcaaaatagtctcaacaaatcctgttacagaaataactagaattgactttaaagtgtgatagtatcttttgtctgtttttacctggtcttcaattttcgtatcagattttaaggcccgagtaagcctttcaggatttttatgagcttattatatttgactgttttttctgccggtgaatgaggacatatagaaacttccccgaggaaccgtgagatcctggagttcgcactccacgcccctcatcttggaagcataatggcagccggtgtaattttctcaagctttaacccattgttttattttcatatctgaaagtccatttggtttgggtttgggttttgatcaagtaacctttacagaaaagagttctgtatagcaaagctgctttcacgccgtgcgtgacttgcaaaaaacactaggttggtgtgaactattaattagtttttctttttttttgtcaaaggtctcaatcaactctgttaatatagttattacacatttatttatgcatctttatacaaactatattctctaattcttgtctgtttaccagacttttttttttttaataaacttaaattgcatttgaggagtgagagagggaaaaggattgtttttaggccttccctagcctttgcgcacctcaacagtcttctctgcttgcacaccaaatcagtagctataaatacagaggctgaaatcacgaattatattgaactttcttctgagtgtttttcctttttttcttttttttgagacaaggtcttgcctcatcacccatgttggagcgccgtggtgtgcgatcatggctcactgcagcttcaaactcttgggctcagacagtcctgccacctcagtctcctgagtagctgggactactggtacacgccaccatacctggcttaagtttttttttttttttttttggtagagatggggttttgctatgttccccaggctattcttgaactcctggcctcaagcagtcctcccacctcggtctcccaaaacattgggattatagtcacgcgccaccatacctgacctcctaattttttttttttttgagagtctcgctccatagcccatgctggagtgcagtagtgcagtctcagctcactgtagcctccgcctctcaggtcgaagcaattcttctgcctcagcctccctagtacctgggattacaggcacctgccactatgcccagctaatttttgtgtttttagtagagatggggtttcaccgtgttggccaggctggtcttgaactcccaacctcaagtgatccacccgcttccgcttcccaaagcgctgggatgacaggtatgagccaccgtgcccagccttaaagtcttagaaacttcctaagagcgtttttaattttttgtgtctagtaaagcatacataaccaaatttgcctttgtaaccatttttacgtgtacagtttagtggcgttaggtacattcacattactgtgcccctgtcaccaccatccttttccagtacttttttaaataggcaaattcatagagacagacgacagccttgtgttttccaaggatggagggaaggggagaatggagacacactgttcatgggtggcgatttgaaactctgcacattaagcaatagctccttttccaaaaccctcttctccctggccctgacaactgccattctaccttctatgaatgtgattagtgttttaattttcaataagattctacttaaaacagtttcatgtaatgttacctgtagatgagtcattcctaagtaatttgaaactacccaggagatgcattttcagaagtctttttaaaagtcttatcagtatttgcaagttgtccagtggtttccatgtgtcaagttttatgtttgtttttgcagaatgaacaggcatttgaagaagttttccagaatgccaacttccgatctttcatattcagagtcagggtcaaagtggagacctacaacgtaagtaagggcctgggcagcagggttggtggtggggaggtgctgtttgtcacctacggcagtgtcgtgacactccctggcagggagttactgtactcactgccagaccccggtgctgactttgcccaacacaggtgctgttatgatccccattttcagatgaggaaggagagagagcttaagtgtcttgtcgaaacaatggcgggggggtggggaatacaatatggatttttttgtttgtttattttttttatttttattttttttcagttaaatcctaggattttttcgtctgtgttctgacaaaaaaattataacgcatgcagtagagtcatatctttgacaaatttagattgtagaaaagtatattaagtatatgagccgggcgtggtggtgtgtgcctgtggtcccagctacttgggagactgaggcagcagttcaaggccagcctgggtaacatagtgaaaccccgtttctaagtcagtcagtcagtatatgaaacaaaggccacgtgtggttaaaactaccttgaaaattcctgaaattgcccataataccatatagtatttatttatttatttatttatttatttatttatttatttatttgagacagagtctctgtcacccaggctggagtgcagtgggacgatcttggctcaccacaacctccgcctcccgggttcaagtgattctcctgccttagcccctcgagtagctgggattacaggcgcccgccaccatgcccggctaatttttgtatttttagtagagacggagttttcaccatgttggccaggctggtctcgaactcctgacctcagatgatccacccgcctcagcctcccaaagtgccaggattacaggcatgagccaccgcgcccagcttagttatagttataatcaaacagtattgagcatggtctgccaggtaactgttctacatcctttacgtggaacatctcacttgagcctagtaaccctatatgtagaaactgtggttaccctattttgccactgaaggaattacatacagagagacacgggcattcagagaacaagtcacttgcctaagttgtatgctagcaagtggtcgagctaacgtccaacccaggcagcctgacttcagagctttgcttttgatcatgcttacgagtatcacgggatttagtaccgaccaagcacacagcagtgtgacagccccgagctcgcctgtgcagccttcctgggtatcactccgttctgcccggaaaggcaccattcaggccgtgagtgtaaacgtacgagtgggcagggggagtggtagaaacgcccctgctgattgcagggtttactcacgtatttaccttaacgcccgttcttctgcgactactataaacattaaatgagataggggatcagatgtcaccgtgaaacaatgtcagggagtggggtggggctgggggggatttttggggccattcagccccatcgtgtctggacagggaaggtgaagtgaagagaggctgcctccccagagctgagacaggacagactcggtcctctccctctgctgcaggtgctcttcctttcaccactcagcttttcttgaaatgaaagtttgaaagtttagctttcagaactagctgtgtggctttgtgcaagtcacatgtcctctctgggctgtatcccctgcagtagggagaataaatgaaactagagaaaccctctaaagtccatctcactaggattctaggcttctgggtgtttgggagcttgggtaaagaatcagaagggcctgtgctggagaaaggacctgttcactcgcccagccccagacattcaggaggaggctgtcactcactggaatgactgaactctgaacccgtgcgtctgttccctcccgctgggctcactgaaaccactgaagcaaaaggggtttcactgctccacaccacactttcactgctcacaaactacttctccctttttgaaggacgagtctcgaattaaggccactgtgatggacgtgaagcccgtggactacagagagtatggccgaaggctggtcatgagcatcaggagaagtgcattgatgtgagaggagcagtgccaatcgggcagaagtttgcaaataggcagaatggaatcgatttcctcccacctccgtgtgacgatcccatgttagctacacagtgcagaggctcttgatggtggactaagcaatttcccccctcgtgcgcatctcagaacccatcggtaggcaaaggaaaatacgctcaggtggttgtggtgtagactgtgtcaggcctacggagtcagccagtggctagcgcaagaccagtcactccctctgccttcaggcttctgtcaatttcattatcatcaagcaggaattatgtcgtaagtcactgaccctaactgcagaccatgaagtaaattatgtaactaggtttttgcttctccagtggtgaccacccccccccatccccgctcacaacttgggttcttctcagcggggcgagctgagaagcggtcatgagcacctggggattttagtaagtgtgtcttcctagaattcgaaggctctctctttctagaggtgctacatagttggtaatgcttggaatggcaatagggtagaatgattaatcaaaggcatatcttctatatctgaagagtatccttccttcagggtttaatagactgagtcagatgggtctgatattaatcaaaattgtctcttctgaggaccgctgataagcattgacttgccgtcccctaaggaaatccgagcggctacaaagcgtttctttacttctcacttcaattaatgctgcgcttcgcttggtgagtgcgtactttttctacctgtacacattcctgcattcatgtattttgttttttttgactaaagctatgttacatggaaaggattttgaagccttttgtttcccttgctttgttttaataaacagtatattctttggttgtgaatcctactttctttgaatgcaaagagttcctataactggaaagcaattaattagccttcataataaatgttcacttgggggggatgttaactcattataaacccgaagattagtccaaggcatggagatccttcttcctagtgtttgcagccctgaaatgcatctttcaaagcatgaaaacactaaaaacaaaaagccattttgcctgaggatgctgatgatctggcacttgggattttattgatgtttacgcagcagtctaacaccaaccacgctttgaaatgtgtacagacagtgagctggtaagaaaacagtaattatgctagtgggcctttcagtcagcaaaagcatgctcgctctgtgtgttcctaatcatattaattatctatccggtggctgcaacacaccgcctgccattggccgcacatctcgccgtcgtaccccggcagtgcggcggtcactctgcagccagaggacctgctgttcatcactgcacatgccgcctgcggaggcttttggatatggggagtgatggtgtcctgtctgtctcccccctcggtgtctgccgttgacataggggccagccagccctagacgggatgacttccgttcctgaggacagacacagagggactcctgctcagcctcactaattgtttagacacattccttcctacccttctctagtctcaggagatggtaactgggtcgcatttcagtctctgactgaggcctcagccatttttacggaagttcttttctgtctgaccttgcttataaagcatcgacgagaaaattacagtcttcaaccctcttctggattgacaaattgtggctgggaagtggcgatctagctttcagcccagtaaccagtctttcatgcctactactcccagcattccctcctctccccacgtgtctgtccacacagtgaagaggcctgaccagccgtggtaccaggacaggacgtgtccagggaacgctgacacctgtcctcgcgccttctcagtggccagcgtgatgaaaccagcacgtctccgtggatgtgattgggaacccaggggcagtgccagggggagggctccctcgaggaggctgtttctaacagatttccccactcaaagatcagatcaccagcagaggagcatcagaaactggctccactgttgggcttttcagagattttggtccctgcgggttgcctaaatagattctggcccacagtttacctcgaaaggctgttgatgttgttctgtttctcctctttcacttagagatcaatgttgattttgcgtacaccatgacatcagcgttaggcaattaggagaaaaaaatctaatcatttcgcctttatttcaagtggttcttgaattccctccagtctcattgtgaaaggggcagggaaaaaaataaaagggtaataatctgatttctgtccatatttccagtgttttatgctttccattaaaaccttgctaatctctcgcgtgctgttccttttttgaactgcagggtcaaaaatgttcccctcccccacttctgtttcctgagtgggctgtcttcaaaaagtataaatactattgatcgtggtatttaatacactaatgaaacccatggttattgactacataattaatatactgtccaaaagtgaagtttggccgcccagtatgtaaaggtttatattgactcatgtttctttggcaatatgccgcccaaggttttatttatagaggatgaaacaggttgtttggtctccttttcttcttttcacctgttagaaggccactattcccctagtaaactgattgtttccttgtctcaaagggaagattccccccactccccggccaccttttatgtggtttgttaactcttagtcttatatccactccgctggtagagttctggcttttataaacacctttggaagtcatcggttcctcaaaaagagagcatagatgtttaattttcacttattcaaaaaaactggtatttttgttattaagacattaagtaaatgtttaagaaaaaaaaggataatttggactattgactttcttatgcaagtaatcatatttgtttgtttgtttgtttatttattttgagacggagtcttgctctgtcacccaggctggagtgcagtggcacgatctcagctcactgcaacctccgcctcccaggttcaagcgattctgcctcagcctcctgagtagctgggactacaggcatgtgccaccatgcctggctaattttctgtatttttagtagagacggggtttcaccgtgttagccaggatggtctcgaactcctgaccttgtgatccacctgcctcggcctcccaaagtgctgggattacaggtgtgagccaccgcgcccggcctccatgtttattttaggaaaataatctacagttaagaaaaacaaaattggcctggcacagtggctcatgcctataatcccaacactttgggaggctgaggcgggcaaatcgcttgagccaaggagttcgagaccagcctgggtaacataaggagacccccgtccctacaaaaaaataaaaattagctgggcgtggtggcacacacctgtagtcccagctacctgggaggctgaggtgggagaatcacctgagccgtgggaggtcaaggctgcagtgagccatgattgcaccactgcaccccagcctgggcgacagagcgagaccctatctcaaaaaaagggggagaaagggtgggtgcggtggctctcccttgtaatcccagcactttgggaggccaaggcaggtggatcacctgaggttaggagtttgagactagcctggccaacatagtgaaaccccacctctactaaaaatacaaaaattagccaggtgtggtggtgggctcctgtaatcccagctactcgggcagctgaggcaggagaatcacttgaacctggaaggcagaggctgcagtgagctgagatcgcaccactgcactctagcctgggcgactgagcgagactccatctcaaaaaggcaaaagaaaaataaaattacttaggatttcaccaaccagtaataaacacttgtgtagctggctacttttttcttctttttttttttttttgagacagagtcttgctctgtcgccaggctggagtgcggtgacacgatctcagctcactgcaacctccacctcccgggttcaagcaattcccctgccttggcctcccaagtagctgggactacaggcatgtagctggactacagcctggtagttgggactacaggcatgtgccaccgtacccagctaattttttgtatttttagtacagatggggtttcaccatgttagccaggatggtctcgatctcctgacctcgtgatccgccctcctcggcctcccaaagtgctgggattacaggtgtgagccaccgtgcctggccctggctagttttttctatgtatctatgtgtatagagtttaaattaaaaatggtagcatagtaagcatatcattttgtaatgattttctcctaggatgggcatctttattttgataaaaattgcatcagaaccaccattaggccaggtgcagtggctcacacctataatcccacactttgggaggccaaggcaggtggatcacttgtgatcaggagttcaagagcagcctggccaacatggtgaaaccacatctctactaaaaacacaaaaattagccgggtgtggtggctcacccctgtaatcccagctgcccgggaggctgaagcaagagagtccctccccgtgaggcagaggctgcagtgagccaagatcacaccatggcactccagcctgagcgactgagggagactccatctcaaaacaaaaaaatcacaaacataattaaaagatttactaatcattaatagctttagataaataattttaagtggtgtttggctctttggatgtgttttcagccaattcactcttgcaggatgcttatactttttctaattgttataaattcaagatttcacgagcagaagcgtttatgctttgtggcactgacaatccatgccttttcttgttctgttaggttctctcattgatttttctttgcctaagtccagggataactcctctaaccctgtgtaccaccaagggctggtaggtaatttgagcaggtccttccttggaagcaggtagattaatgtagggaggggagggaaaaagaaggctttggagccctggtttcatcctgcctactacacagacgggggctgtgcctatgaagaggcgaaactcttgtttcccaccaccctggcaaagaaggcctcttgagaatacatttgacttgcctataaatcaacctgattatctaaagctattaatgattattaagtcttgtaattatatttgtaatgatggttttgaaaagtcattgagaaaagtatgtagccactcgtcttcatggttccagcctgtcagtatgtgactttattttttgagatggagtctctgtcgcccaggctggagtgcagtggtgcgatctcggctcactgcaaccaccacctcctgggtttaagtgattctcctgcctcagcctcttgagtagctgggactactgcacgcccagctgattttttggggtctttttgtttgtttgtttgtttgttttttagacggagtttcactcttacccaggctagagtgcagtggcacaatctcggctcactgcaacctctgcctcccaagttcaagcaatcctcctgcctcagcctcccaaatagctgggactacaggcgcccgccaccatgcccagcttattttttgtatttttagtagagacggggtttcaccgtgttagccaggatggtctcaatctcctgatctcgtgatctgcccgcctctgcctcccaaagtgctgggattacaggcgtgagccaccacgcccagccttagtatgtgactttttttttttttttttttttttttgagatggagtttcgctcttgttgcccaggctggagtgcaatggcgtgatcttggctcactgcaaactctgcctcccaggttcaagcaattctcctgcctcaggctcccgagtagctgggatttacaggtatatgccaccgcgcccagctaattttctatttttagtagagaccatgttggtcaggctggtctcaaactctcgacctcaggtgatccgcccaccttggtctcccaaggtgctgggattacaggcgtgagccaccgcgcccagccagtgtgtgacttaaagatatctgtccctgagagctatggactatttagagcaaggcttgggggctaagtagtcatatcacagtgatattaaaatgcagttgagggggaaattgctggaagactggagtcaatcaggaaagacttcacaaagaattgggtgatttgagactcactgattagagccttcatttaggtcggggctgtccggtctgtatgaggcagaccgagagcaacactggtaacagtggcatgcgctgtgttcgtcactgacacgaagccacgcggtgccacggaggctgggtagaggtactgaacggaaatgggttcctggtgcaaataggacagtgtttgactatgggctgagtgaaagtttcttttttttttttttaattttttatttttttgagatggagtctctctctgttgcccaggctggagtgcaatggcacgatctcggctcactgcaacctccacctcccaggttcaagcgattcttctgcctcagcctcccgagtagctgggattatacaggcgtgtgtcaccacatctggataatttctgtatttctagtagagacagggtttcaccatgttggccaggctaatctcgaactcccgacctcaggtgatccggcctcctcggcctcccaaagtgctgggattacgggcgtgagacactgtgcccggccagtaagaggttcttgtgttatccattgccatacccctaacctgcattgggtttgtcgtgacagtgtctgacttgccagtgagctcgtgggtgtttgtgagaggctttgaaccagccacctggctgcatttgcagcttctcaggctcttagtagctgtcgctttacaccctctccttagctgttgatgagtctcaaaatgtatacttttcaataaaacaaatctttttttcagccttgaatagaccctgtgaaaaactgaatcccacctgcctcgtgagaaatatttatatagccaactcagaagtgatcgtgtaaacttttaataattgcgagccgttcttataaaattatgcccgttccctagtgcattacccagttggtaattggaagtttgtgctgtcattaaaaatgacagcttcctcagataacattctcggtgcttgtaaaatgcaaataaccaaacctatatttaacttatgtgtgttgcagcttcctttcaacggccaggtaacctagggggctggtgcctgttaaagaggagggcttgccgcggggaactgcagctttgtgctcttcaatgcccagccctgaaatggagttagaacaggcaggactttttaaaaataagccccagttggactctcatctcctctcaccgttgacactgctgttcatgttgaagtttatttatatcttcagtcagccatggtacagaggtcatttccattggcctaaaattttagaggcttatatgtttgcctgggaaagctgatctcctcagcacttaggcttgtaatgcaaagcctgtctcttgcagaagcttttctgcttccataacacggcgactcccaccgtcaccaccaccaccaatttcctgctccacgatttattcaaaatctgaatagctgtataaggtgcatccctgcaaatgagctctcctcctctaatgggctctttccaggcagcaaacctttcacaaaggagccactaattaagcaaaaaacagtttgtcttgcttagccacgtttcaggagtccagcagtcagtttagaagacggcaacatcctttacagccgtgatggtaataatattcttttgtctcataccagggtctctaactggcaatttgggtgtctgggtgtgcgtgtgtccctgttctgtcttgctctccatcttgaagaggaaaatttgtttccgtggacttttatttttttggaaatccttgttaaagttactctgtaaggatcaaacccacaccaagccttcctggttggaaagaggcgctgcctgagtgtcgatttgcagtgggggcacgcgcaggctctccgggaaaacgcctgtcagtcaaagcggctctctcgtgagagcgtctgactgctcggttcccttccatctccgtctgctggagaattgaaggtgttagcaggttcaccgggcagcaacgctcagaccgatgtgcaggccaccgccgcatgctgcacgtgcctcctaatagaaccttgagctcccgcagccaagcctcattttgtgtgtgtgttattaaagtgccggtgactaggaaaagcagagccctcttaattagagagcgacatccttgcatagtggtagtgttccgtttgtggcataattgtcacagcaaattaccagttaggttaaatattgggctggtagttctcagcgcttccattcttggctccaccccgccctccccaccctctcctaccctcaccatcacctgctagcctgcacttttaacttgatcttctgccaagtgatagcttttaagtgaggcttagagcagatacactttacagcaggagcaataaatctagctttgggcaagttacaggatgccaggaacatctgaatgaggggggcaatttttgctgtgtgtatgggggtgtgctgggtcgtctcgtggggctcagctataaaactgggtcctccgtatatctgacatggtgtctgtcccgtgagaagatacttgaggtgacacaagaaatgtgaaggaaatagaagacctggtcccttctcattatccgtccatggcggggggggagcctcacaaaatggaagagcactttctataagcaaaaccagagtgacacagaggatgctgagtacgtggtgtgtgaagggagtccagtgaaggagagcggacagtctggtggaggcagacaaaaaacctatgagttgtcatcgtgaagttgcaaaaaagggattggctggccgggcgcagtagctcacgcctgtaatcccagcactttgggaggccgaggtgggtggatcacctgaggtcgggagtacaagaccagcctgaccaacatggagaaaccccgtctctgctaaaaatacaaaattagccggggtggtggtgcatgcctgtaatcccagctactcgggaggctgaggcaggagaatcgcttgaacccaggagacggaggttgcagtgagccgagatcgcgccattgcactccagcctgggcaacaagagcgaaactccgtctcaaaaaaaaaaaaaaaaaaaaaggatcggctggaagaaaagtccatttcaaactgaaggactggcacgttgctcaggagccagtaaaccaggtgcaggtgataccaagaaaattagcttggtttgagtggtgagtctttgtagaaaaataaatgagattgctgcacactgggagggcggcctggatcttcatttccttggagcttaagacttaagccctgtggaatgtaagtcctaggagtgtcctttgtcactaattgatctttcagctgctcatagagctggcattcttgcaggccaggtacacgagaagatagagccggagcagcctgcctccgcttagccaactgcatagctgaggaaatcctgccgggcatgttattggagggttgtgcactctattcctcacgagcttcgtgctgggatgctcattttctctggacaaagatagactggctccctctcttgttgatggaatggaaattctctcttgcattatggtttctgtgataactttggtggcggtggtgtggggataatgaagagtctcttaatggctctagttaaacctggtaatatcactctatcacactggagccggccgtgggaatctaacccacttttgtattcctaaacgcctaaaacctgccactggcatcttcgcataataaggaaccagtcatcgctcgtctgtgtcctggaacatatttataagcctatgttaatttctggactccggaatggcgcctcttccaatcccagccctcggtcagtctctccggatagacttgggaagtcaggtcgtttcagccacacatcaccattctccgtccctgagcccggcatgctggtttagtgcccccaaaggaagagaactcattttattctggaaattgggaaagtgaatttgcttcaggacctgcctaggtctaattagtccagtccgtaagcaggcctggctccgtgtctgaggcatgcgtgcacgtggatggtgtgtgtgcacacgtgtgtgtggcatgtgcacgtgtgtgccctggcagccactataacgtgcccggcagtggccgctgttcgcccaggttggcccagttcagtcctgcttctcagggtggctggtagatgtggccaccttacaacccccaaaagccttccatgtgcacccccaacccccaaaagccttccatgcgcacccccaaatggagaaggggccgggtggggtgtcattaggagatgggggccacgtgccaagacagaggaaggggaaatggggagaaaacaacaagaaaaggaataggtggggagagaggtcattttaacctaaattaaataatggaaatgaccattatgaacacaacgagggcagggattccgtagccagagctgcgagaccgtgacaaatggctctccagggaaacggggtgcagcctcctctcctggaagtcaggaaaggggtctctccaccaaccaggggcgggaggcagagcctgcgctgccggatttagcctggaagttaaaatcgctgaagcagtttatagaaacagcagagtgagccgccgcgcacaatcagtaggcaggatccagagacgatggcataaatgtttcaaatgtgctcagggtaattagttttgaattaccatgtgcatattttaaacatttaaatgatcatcccaggttttcgaaaacagttgcacgcggcttgatgtcacctcccctcccgggcggcctccccaaggggacacagccaggtggggcctgcgggtcccgcgacctcagccggggaggggcgcgcgctaagcccggggatcagcgcggattaggccgcagccccgagtcctggagcagccgctcgcccgggacttcccgtcctccaagcctgcgtcggctgtgccaggttttcaagacgatctgctcagcgtttaggtttcccattgtgcatgaaaatgcaattccacgcgggcagtttttctcccccgtttgatttcctggagacccgggtggctgggaaacttgaaaggtgactggccaggtgggaaccgcgtttggtgtttgaagccagccaccttgtccgccagtctctcgaggcgacctgccttgcagcaactccattctccctggggttcgactcagaatgcaaacgacgatttccaaattccctaattccggaggcgctgggaggggcgaaggtgtcaggcctggacccccaccccccgcccgcgccttccctgccggctgcaggggcggatccaggctgcgccctggggtgtctcacagaggccctgtcggcggggcgcggcgggtcggggtgtctaaagtcagatccctaacttcagacacccgaatttagcatcgtggcttagaaacgctgccctgtgtccccttcctcccggttacaagctgtttctccagcaggtggagctgggagaataaaaactatgagcctgtgcctgggaccttgcagagggagctatctgtgctgaaatcctggttgaatgaaaattgttcattatgcaaactgtctggttcagtacacagaggcagcccccaggcgcaaaccccaagtagctgcttcttctctccccagattaaaacatatgaactgctttgatgtaatcttataacaaagcctaatagaaattttatttctttgaagttgcctgtcatttcttattgccccccttctcccgtcctattaatacccgtacagtctgggatatgcagccgagtttagactgtatttgacgatgggaacagtgtgttttcctcggcagtggtctgagttatttaaatgcagttacattgcttgcaatatgtttaatctcttgggcttcccccccgcccactgctatttatcatgttaatagaatgctacagaatatcacattatgcaatgtgtttaaattgataaattatattagaaaaatattgcataggcgtgttaatggtaagtgggtttttgtagaaacagtttctcattagtagatcagctgctcacagggtagaaattgtaaggatttgggaatatgctatatttatgacctatttggctaattaaaattaaggcataattttagcatgaagttactgcaagactttgcagagagggtggggaaagaaacttgcccaaatccagttacttttaaatgtcagttgccataacaacttcacatgagccatatttttacttgaaaattccttttaggattcggttgctataataatttgcctcagctctttttaggagacatattttccaattttccttctgtgatcatttcaagactttcattactgtaacgaaaaatgaccatggaaacctcaactcttcctttctccgtgtgcaggagcagagtggtcccccaaaatagaaatataggtttccaggaggtattctgtaggaaggtgcccccaggccatgggggaaggggccaagctctggggatccattgttgcaggagccagttcccttctgggtgggaattatgaagcccacagaattttttgaggtgtggctgttaagcttttctatgtcctgggagttttgcatgaggcaaaggccagcctgaccatctcaaggaagaatgagtctactcatgtattatgaaggcccattgggggccgtcagcttgtcattcagtggaactgctggtatttgatgagcaagtgaggcaatccccaaagtatttacttagaagcaaagtagtagcagagtaaagttcagtgccctttctttcggtgtttagctgctaaccttcattcattagccaatatgacctccaagaagcacctgcagctatgctgtgttctggccacagacacaccagagaggactagtttctgccagctttcagatctctctgggccaacaccgtcattgctgagggcaggctcggggtcccaaggaaaaggtcccgcaagcgggaagaacattccatttcaaaaggcttctggttcctccttctggggggagcatggctgctcttgctgactagtgtccctgacagaagctgtaatcgggtctctggctttagggataccatagctcctctcttgggaattgccatggtccttcctctcccttttccatcttctctttctacatcaactctttggtgggatctccaatggccacatcttttttttttattattattattttagatggagtttcgctcttgttgcccaggctggagtgcaatggcatgatctcggctcactgcaacctcagcctcccgggttcaagcaattctccagcctcagcctccacctccggagcagctgggattacaggtgctcacaaccacgcccggctaatttttgtatttttagtagagacagcttcaccatgttggccaggctggtctcgaacttcggacctcaggtgatccacccaccttggcctcccaaagtgctgggattacaggcgtgagccaccatgcccgcaatggccacaactttttttggggaactctaaagctcgaaaggggacagtggggctgggcacggtggctcatgcctgtaatctcagcactttgggaggccaaggaggatggatcacctgaggtcaggagttcgagaccagcctggccaacatggtgaaaccccatctctgctaaaaatacaaaaattagctgggtgtgatgacacgtgcctgtaatcccagctgctcgagaggctaagccacaagaatcccttgaacccgggaggcggaggttgcggtgagccgagatcacaccactgcactccagcctgggtgacagagccagatctatctcaaaaaaaaaaaaaaaaaaaaaaaaggaaaggggacagtgggcctcctgcaaggagcagagcagaggaaagaggacacctgcttacctcctgccctcctccagggactcctgcacctcctgatgtcctcacatgtgcagcgagggggacagttgtctctcccatctcacagggcggaagtgaggatcaaatgcagtaatttgtgagaaagaaaaaacataaaacagtccataaatgtgcaaggaatcataattattatattttctcctctgggtgaaccagagtttggatgtatgaagctcacatacgaggaaaatcaaccgggtccgatccatgagctgctcttttcaaatctcagtgatgtgcctctggaagagactttggtgaaggtttgcatctgtttggggatgtccatcattttgattgttctgtacacgtccgctgaaatgtaatacttgacatttctcgagaacccgttgtattttttttttaaaccttgtaactgaactatatgttcagggaaatggaaataaaacatgattgcttagtttagatatgaaagtggagtttctgctttatcctcaccctcctttgaggacactcattctttccccactttccggcccccaggcgtagaaaataggctgttcctttgcacatgagggaggcagcgtggggagaaagacaacgtgaggactgtggtcaggcagatctgggttcaaatcccccatcttccatttacctgacctcagaatttattccctcgtgtgtaaagcaaggatgatattaacgcgtgccttccaggccagttgtaagaattagaaatatcatacataaaacacctagcgtatcgtgggctaacctttttttttttcttttatgcagctaattctgggagacgtgggctatgttttttaaaatgcagtgatggttgctatccacgctcaaggaaaaatggaaattcctttggtcagtctggcccagctgctggcgccctgggacctctggggggatgttttcatgccttcaggtgattagcatgaggcagcgtctggagtctggtggtgaccgtcatttcttagagctcctgaaggcaactttgggacagtgggtgaacagcattgcaagcaggttggttttgactcaaccaaaaaaagtgctttctaatgatcagaagcaacctgcgacataataggttgcttcagaggagaatgagctggtaaaaaaaggctggtaaacgtctgcaaagccccctgtaggagcagagccctgtgcttggccctggcgactgcgagcttccggtgaggacacgtgaggaggagcatccctggttcccgtgcttggctcagacttcccttttggctccgttcctccctgagggtgccttgtgggcaagatgctctgctgtggtctcccactttagaaaccgcctcaacgagaagggactcagggctgagtgaccctctgagacagggacatggtttaggcaggtgtggcctgtctttgggaaaggtccaatgcccctgtggctttgttatggatccaaaattacagttactcggctaggcacagtggctcacgcctgtaatcgcagcacgttgggaggctgaggcgggcggatcacttgaggtcaggagttcgagaccagcctggccagcatggcgaaaccccgtctctactaaaaatacaaaaattaggtgggcgtggtggtgggcgcctgtaatcccagctactcgggaggctgacgcaggagaattgcttgaacccgggaggcggaggttacggtgagccgagatcacaccattgcactccagcctgggcaacagagcgagactctgtctcaagaaaataaaacaaacaaacaaaaaaccaaaattatggtaacccaaggggtggccgggaagttcccattcacagcacaggatccagtgggggctgagagagaaggctttgtcctgggagcagttctctgggtcactgtggctatcacagtaggttgaacggtggctacccacaagatacgtccacctggaaacagtgaatgaaaccttgatgggaaaaagggtccttgtcgatgtgtttatgttaaggactgcaggacgaggtcatcctggctagggtgggccctaaatccaatgacaagcatccttctaggacaacagaagaaggagacaggacgctcagagaaggggacgtgaagacaggcagagaggctggaggggtattcctacaaacccaggaacaacaaagactgtgtgcagccaccagaggccaagagaaaggcacagaacacagcctggacaacacggcgagaccccagctctgaaaaaaaaaaaaaatgtagccgtggtgtcacatgcctgtagtcccagctactcaggagggaggctggggagggaggatggcttgagccccaggaggcagagcctccagagccatgattatgccacggcacactagcctgggtgacagagtgagaccctatctcaaaaaaaaaaaaagacaagaaaaaaagaaaggcatggaacagattctccccgagagcctccagaaggaacgaactggccaacaccttgatttgagacttctggcctccagagctggagagaatgagtttctcttgtttccagccacccagtttgcggtcgtctgtttcggcagccccgggaacacaggcagcctattgtgtctgtcatcttgaattaccctgtgtcctttcggctgggtcagtggagaagccgtgggttcactcaggtttccattgtattcattcgtaactgggatccctcactccggggctgtcgggttcgaatcctcacggcccagctcgccttccttcaccccccagtgccttcttctgcgtcaggtatggctgcacccttagtgactggggttcttatcacttatcggcatctgatccagctccgaggagcacggggccctgggcacaggctcccatcacacacacacacacacacacacacacacacacacacacagacacacacaaaaggcacatcagcaactggaagaacaaccttttcaaaaatcaccttttgaaaatagtggcaccggctgggcgcagtggctcatgcctgtaatcccagcactttgggagaccgaggcgggcggatcacaaggtcaggagatcgagaccatcctggctaaaactgtgaaaccccatctctactaaaaatacaaaaaattagccaggcgtggtggtgggcgcctgtagtcccagctactcgggaggctgaggcaggagaatggcgtgaacccgggaggcggagcttgcagtgagccgagatcgcagcactgcactgcagcctgggggacagagcgagactccgtctcaaaaaaaaaaaaaaagaaagaaagaaaatagtggcaccaagcatgcagtaaatagctttcagccacattccaccagccataaatttgatctgttttgacctggacccagctgtttcctctcctcccgtcagcctctgactctgaaatggcagcggccaagtacccattgtcatcagcagtgagttctcgtggggaaaggccactttaatgagagagttggcaccacatcctgcacctcagcatgtattgttccctcagcaaactttctagttaacgagtttgggggttttgatctggagagcactggggagagaagctggaaggcccagcagtgacatccctttggagccggcattgtcttccaggagctgaagatcagcctgcagggggtctagaggcgggccgtgcaggtggcatgctgggcagttccatcccatccactgctgcctccgtccccagccccctgctttctcctaggagaacagcagaacccctgggtgtggttctttgagcttcgatgggcctgccctgctttttagacagaagcgtctcttctcagtgcaacccaggattagtatggaaatagagacatttttaggaggcctctgctgatagcccctttaccgtcggtgtgggggagtcagcccctggcctttgctctgaggagcgagggtccatctatcctgttgcctggcaggtggtacctaagatgctcttgtatgggaccctgtcgctccagaacatccatcgagattctcccagccaggctcgatgtccaaggagcagcagcctttctaattctcggaaccaagaagaaccttttttttttttttttttttgagacagagtcttgctttgttgcccaggcttgaatgcagcagcacaatctcagctcactgcaatctccacctcctgagttcaagcaattcttctgtctcagcctcccaagtagctgggattacctgtgcgcaccaccatgcccagctagttttgtatttttagtagagacggggtttcaccatattggccaggctggtctcgaactcctgaccttgtgatccacccgccatggcctcccagagtgctgggattacaggtgtgagccactgcgcccggcctagcagaaccttttaaaccttttcatctcattctttctttcttcttctttttttcttgcagtattatttactgtgtgagagcaccaaggatggaacgctgctgaaaatgagggggctgtcaaaaaccagaaagaagggaagtcaaatgctgcccccagcagcaatcactggcaggtgtgccgcgatccccccacttctcagtggggtggtcctacctgtgccagcctaattgctaccagtctgcggccctgcgtggtaatgagggacccgggcgctagggcactctttaaatgatgcaacatttaaatgacttccatttacctttcatgcacctctgcttcgcttcttaattattggcagcatttgacttcctcttttgctatggaatccatttcctcagcctcctggggagaggctgtggcctcctgtgtaccgtggggcggcacgttttgccactgttgtggcaacagactgtgatttggggaagaaggctgtgaccctcaggacaagagagagatgctgggagaggggacgtctcttccgtggaaaagcagcatctgtaatggagtccttagcaatggcagagggaggggtgatgtggggaaatgcacaaagctgagcgtgaagtgtaaatatgatgattgttgtctctttcttgggaggtaaataaatcagctcgatgtagatttgagaggtggctggtgatgctgtgtactcagcgccccgaactcggcctcttcagagtgcttcagatgttgattcattacaccttccaccagctcagggaggatggaggtggggagaattattatcccggctctaaacccggggactgggcgaggttaagaggcagtaagttgggaggaaaaggtggcggctccggcaacccagccaatgcttccgccgctagaaacgtctgctccacttagaaacaagtcattgtcaggtaacctatttttcggggtgtaattccagcatatgagggctttgtctcctctgtatatttctttgcttgaaaaatgtatgagcttatggagctggagagagtgaccttaatcctttaccaagcttgtttgggggctgaagcatccaagagggaaagaggagaagctgacacactccaggtcccagccccactggaacggagtccctttggtacatggattaaaaaaaaaaaaaaacctgggctggggggctgtgttatacaggtggaatcacaaggcttatagccttgagtttcaggagagtgtggatctgaaatggtttgatcatgaagtaactgtcggccaagtgtccggaggaagggttcagcctgaggctgcggccgcgggtctgtgcagcagccggtgcagggaccgtggagtagcagctgggctctgcgaatgggtggaaagggcagagtcaccgcagggccagagttcaaccccaactatagcatgagaaagccaggcagtgagggaggggcgggcagtacgtcctccgcagtgtgctgccgtgcatttggggcagtcttgggctcatctcgccccaaaccctgccgctctcctggggcacctgcgaacgggaggtgtgagcaggcaagttgccggcggagctctgtcatgtgggttaccaaggagcaagagaatagaggaagctgccttcagaatccccaaagaccaatttcttccagccccagcgagtgtagggagcctccaccgagtcccagccgtcagggtggctgcggctcggcatcttccaatggtgtgacagatggaggtgcacctggcacctccaggcacctggggagagcgcagggaggtgccctacggcgcatggctccttctctgagggaaggcacctctgggcatgcctgcctggccagcaccttctgccccttgtgcatcgaaagggggaagaagcctcttccctgtttactcagcccaaagccacggggccaggctgctcccagacccactgggcaggccctgtagggacagtggcagtaggcggttagccctgtagggacagtggcagtaggaggttagccctgtagggacagtggcagtaggcaggccctgtagggacagtggcagtaggcgggccctgtagggacagtggcagtaggcgggccctgtagggacagtggcagtaggcagtcagccctgtagggacagtggcagtaggaggttagccctgtagggacagtggcagtaggcaggccctgtagggacagtggcagtaggcgggccctgtagagacagtggcagtaggcagtcagccctgtagggacagtggcagtaggcagttagccctgtagggacagtggcagtaggcaggccctgtagggacagtggcagtaggcgggccctgtagggacagtggcagtaggcaggccctgtagggacagtggcagtaggcggttagccctgtagggacagtggcagtaggaggttagccctgtagggacagtggcagtaggcaggccctgtagggacagtggcagtaggcgggccctgtagggacagtggcagtaggaggttagccctgttgcagagaacctgccaccaccatccctatctggcgctctccctgcccttggttctttcccttcttctctctctacccccttctctttttttttctcactcagcttctctgctgaattctgcattgacatcagcacttccaaaaacaacaacaaaggaaagtaggtcaccggcgtaccggatcggagctgggccccggtgccagctgagtccggggctgcggcccatctcatggagagccgggggcgccccaaactctgcgccacagcctcacacatgcagcttggttcctgccctgtgttcttagcgggaaggggtaggtatgcgtgcatggcctgtatgttggcatgctggctcacggacggggcagcgttggggtttctgcaccaaggggaacaccacgtacactccatacgttccttctggtccaggtatgatagaactgggggtcaagaaacccagggtgcacacgcctgctcttgggactgggatccagcctgcaaatgcacgttgattgacatacgtgattgacatacgtgattgacatacgtgtgtgcaccggcctgacagcactgccttctcggccctgtccctccagagcttcttcacatgtaacatttcctcggctctctatggtcacggagctcccagttctacttgaaagattacccaacacgctaattgggactcctgctatgattaaaaagaaattccggattacagccaccatgccacagagctcaggaagaaaacagctctttataaacccagcaggagcagactttcgtttatttattttttttctacctttgaaagaaattgcatcttgaggttgtttggcccacaatgagtgactcaagtacacatagtcaccaggtaaggcccaaattgtaaagagaggggcactcgggaagagataaaattacagcctcttcccccgcccccggctttttaatacctaaccgagttatttctgtaagcctagatcctgcctcggccggcgcctttggccccctgacctgggagatagatgctactgttccgtctgggtcagccttcgcccacgataaagcttttatgagcagctgagggtgcttcatttcaatgaagctccctgaagcaattagctctggaggtccccagaggtggctgcagggagggaggatttaagccgtggtcagtgagaggcaggcacagctatgagagcagcactgctgaatgatttcacttgcagggctgagctcatcgcattgatacttttagagctcattagcttggggaggggggctggcacgctgtaccgggtcccctgggcatctgacctctcaaagcagctcctcttggaccaacagggaagaagtcctcctaattccttttctacttccaccaaacacccatcccctagttaaggctttgaaacattaacatggaacccaaaccctcttaaaaggcagccgtttgactttatgaaaatgaaacatctccctaatgtcagcttcattaaaagatgtaagaaaagaacatcaatgtttgctgatagaagaatataattgttggccaggcgtggtggctcacgcctgtaatcccagcactttgggaggccaaggcgggaggatcacctgaggttgggagttcaaggccagcctggccagcatggtgaaaccctgtctgtactgaaaatacaaaattagctgggcgcagtggcaggagcctgtaatcccagctactcgggaagctgaggtagagaatctcttgaacctggaggcagaggttgtggtgagccaggatcatgccattgcactccagcctggacaatagagcgagactctgtatcaaaaaaaaagagagagaatataattgtctttaagggtaactggctggttattgcagataattatctgcaaataatggaaggcaggtgataaggaggaaggaggccatgcacacggagctggcacaggtgagcagagccgttggcccaagtggggttgggttggggctgggaacagcataaggcaagggccgcactgccagactcctccacaaccacccttcccagagtttttgcatgcacagagcagtagggttgcagaaagaatttggagggcttgccttgggttgccagcattttgtttggccaatgagagaccccaagacacagaagctgctatgtaccagtcccgttggttcagaaaagaaagatcatttttacttttattttttagacagagtctcactctgtcacccaggctggagtgcaatggtgcaatcttggctcactgcaagctctgcctcccgggttcaagcaattcttctgcctcagcctcccgagtagctgggattacaggcacccgccactaggcctggctaattttttttgtatttttcgtagagacggggcttcaccatgttggccaggctggtctcgaacgcccaacctcaggtgatccacccaccttggcctcccaaagtgctgggattacaggcgtgagccactgcgcccggccaaagaaagatctttttagaacacccttctccctccccaaaccaaaggaaaaaaaaaaataaggacatgatttcagaataaaggattatctttagatggaataaatttggcttagcaaaaaactcaatacattaatgtttcgttgcaaatcggtaaaatcgcaatcacaggctccccttgtctccaaactagcatttggaagccagtgttcccagggagcttggagcctgccagttgccacagcttttaggatgacaaggaagcagattgcctgggtttaaaattccgttgctggcgtcttctggaaccagccgctccatcctttcccccaccacccccgccccgttttccttgtgtgacagagtggaggagtagacgattgggtcgaaaccaaattggtcaaaaggacaaactggtcaagagcgactatttccgccgcagccttggctgttccacaagccggttctgccaaggactcgtcatccccaggcggagtgccacctacatgccaggtgggaggcggcgttgcggaggagccgctgagggtgaaacgaaggagtccgggccagttcttagcctttttcaggatctgatgaaaaggccgtgctggcctgcacctgtgggcccagctactcaggaggctgaggcaggaggttcgcttgagcccaggagtttgagaccagcctgggcaacagaggaagaccctgtcccaaaaatataaattaatttatttattaattaaaagaaaaaaaaaaaggccaggcgcggtggctcatgcctgtaatcccagcactttaggaggtcgaggcgggtggatcacctgaggtcaggagtttgagaccagcctggccaacatggtgaaagcctgcctctactaaaaatacaaaaattagccaagcgtggtgatgggcgcctgtaatcccagctacttgggaggctgaggcaggagaatcagttgaacccgggaggtggaggctgcagtgagccgagatggtgccattgtactccagcctgggcaacagagtgagactccatctgcttttggctgggcgcagtggctcacgcctgtaatctcagcattttgggaggccgaggggcggatcacgaggtcaggagatcgagaccatcctggctaacatggtgaaaccccgtctctactaaaaacacaaaaaattagctgggtgtggtagtgggcgcctgtagtcccagctactcaggaggctgaggcaggagactcacttggacccaggaggtggaggttgcagtgagccgagatcgtggcactgcactccagcctgggcaacagagcaagactgtgtctcaaaaaaaaaagaaaaagaaaagaaaaagaaaaagaaagctctctctggccgggcgcggtggctcacagctgtaatcccagcactttgggaggccgaggcaggtggatcacgaggtcaggagatgagaccatcctggctaacacggtgaaaccccgtctctactaaaaatacaaaaaaattagccaggtgtggtggcgggcgcctgtagtcccagctactcgggaggctgagtcaggagaatggtgtgaacccaggaggcagagcttgcagtgagccgagatccggccactgcacaccagcctgggcgacagagtgaaactacctctcaaaaaaaaaaaacagaaagagaaagaaagctctctctggaaacctgcacattccaggggccctgcattgaattccaggaggtttgtgaacacctccttcatctccccaaacttgttagggggactctggccaataatcctgcatctggacaaacacttctcattttccacttctcagttcaatgatataatgacatttaaaatcctaaaatttcattcataaatatccaagaaaaaaagaaaaggactattccttccttgtccctgttggaagctttatttttttccttatcaaagttgtttgaatatgtggaaactttacccaaataggtaaaattaatatcactaactgaaaaatatatatatatatatatatatatatatatatatatatatatatatatatatatttggagcagaggtttaataggcaaaagaaagagaaaggagaaaggtaaacagctctctctctagtgagagagaaggaacttctgagatgaaaaggcccagttttttttttttttttgatggagacttactctgtcgcccaggctggagtgcagtggctcgatctcggctcactgcaagctctgcctccagggttcaagccattctcctgcctcagcctcccgatgagctgggactacaggcgcccgccatcacgcctggctctaatttttgtatttttagtagagacggggtttcaccgtgttagccaggatggtctccatctcttgacctcgtgatctgcccgcctcagcctcccaacatgctaggattacaggcctgagccaccgcacccggcccaaaatatattttttttatggtgaattaacagggagttacgcaaaatattaccattgagggaaactgggtgaaagggctccaggacctccctgctgctttctttttttcagtttcctgtgaacctgtaagtatttccaaataaaaagaaaaaaactaagacacattgtaaaatgttgtagtatcacctaggataaattgatatatgaattagtggttgcccgttcagtttttaagccaatttgctattagaccatttaaaattggaaacaaaatattaaaatccatgaaaatattccaaataagaaaagtagacatatttgattgaaattaacatgaaaattttgagacaatttttcaaatgagcaaaaacagtgaaaagaaaatataaattccaaggacagtcccgggattcacaaaagctcttgagaagaggcctaaaactgtcaccagacccagctaatttttttttttttttttttttgagacagggtctaactcagtcactcaggctggagtacagcggcacaatcacagttcactgcacccttgaacccctgggctcaagtgattctcccacctcagcctcctgggtacctgggaccacaggcacatgccaccgtgcctggctaatttattttttattttattttattattattatttttttgagacagagtttcgctttttgttgaccaggctggaatgcaatgacacgatcttggctcaccgcaacctctgcctcccaggttcaagcgattctcctgcctcagcctcccgagtagctgggatgacaggcatgcgccaccacacccggctgatttttttttatttttatttttatttttagtagagacagggtttctccatgttgatcaggctggtctcgaactcctgacctcacgtgatccacctgcctcagcctcccaaagtgctgggattacaggcgtgagccattgtgcccagcctattttcttttttttttttgtagctggaccgtctatgttgttcaggctggtcacaaacttatggactcaagtgatccccctgcctcagcctcctaaagtacttgaattacaggcgtgagccaccgcacccagccctgtgtgttgttttgttttgttttgttttgtttttgtagctgggccatctatgttgctcaggctggtcacaaacttatgggttcaagtgatcttcctgcctcagcttcctaaagtacttgaattacaggagtgagccaccatgcccagcctgcccagctaattaaaacaattttttttgtagagccaggcatggtggctctacagccagttaggctgcccaggctggtcttaaactcctgggcttaaaaccaaggccaacatgggaggctaaggcaggagaatcacttgaacccaggaggcagaggttgcagtgagccaatatcataccactgcactccagcctgggcaacacggcgagactccgtctaaaaaaaaaaaaaaaaggccgggcgcagtggctcacgcctgtaatcccagcacttcaggaggctgaggcaggcagatcacgaggtcaggagatcgagaccatcctggctaacatggtgaaaccctgtctctactaaaaatacaaaaaattagccgggcgtgatggcaggcgcctgtagttccagctactcgggaggctgaggctggagaattgctcgaatccgggattgcgccattgcactccagcctgggcaacacagagagactcagtctcaaaaaaaaaaaaaaagaaaaagaaaaaaagaaaaaaacaaattggccagtcgcggtggctcatgcctgtaatcccagcactttgggaggctgaggtgggcagatcacctgaggtcaggagttcaagatcagcctggccaacgtggtgaaaccccgtctctaccaaaaatgcgaaaaaaattagccaggcgttgtggcatgtgcctgtaatcccagctactctggaggctgaggcaggagaatcgcttgaacccaggaggcagaggttgcagtgagctgagatcacgccattgcactccagcctgggcaacaagagcaagactctgtctcaaaaaaaaaaaaattttttttttgtagaaatgggtctcgctatgttacccaggctgttcttgaactcctggtctaaagtgtccttcctccttggcctcccaaagcattgggattacaggtgtcagccaccacacccagcccagaatgtacctattttttatttatttttatttttagtttttttttgagacagagtttcactctgtcgccgaggctggagtgcagtggcgcgatcttggctcactgcaacctccaccctccgggttcaaacgattctccttcctcagcctcctgagtagctgggactacaggcgcctgccactgcgcccagctaattttttgtatttttagtagagagggggtttcaccatcttggcctggctggtcttgaactcctgaccacgtgatccacccgcctcagcctcccaacgtgctgggattacaggcatgaaccaccacacccagccattttttgtattttttgtagagacggagtcttgctatgttgtccaggctggtcttgagctcctgactccaagagatcctcctgccttggcctctcaaagtgctgggattccaggcgtccactatcttcctttactttgtggaaggaattccctgtggcagcctcgtggtaccctgtaggaagaaggatgatggggccaggtcttctttctctgcccagactacaggagtcggtcacactgaacatggggtcttttcagaaatgaggattcagctacacctgtcaagaaactggggccaccaccttggccagtttgggagttttctgtttgtttgttttttgagacggagtctcgctctgtcgcccaggctggagtgcagtggcgcgatctcagctcactgcagcctctgcctcctgggttcacgccattcccctgcctcagcctcccgagtagctgggactacaggcgcccgccaccacgcccggctaattttttgtatttttagtagagatggggtttcaccgtgttagccaggatggtctcgatctcctgaccttgtgatccgcccgcctcggcctcccaaagtgctgggattacaggcgtgagccaccgcgcccggcccagtttgggagttttctgccactgcccccttttcgtggtgggaaggaagacagatgggagggagctcttggcagctccctcagtgaccgggtgggcaatcccagtcacctagtttgggatgaggggtcaggacagcagaaagatctaggaaagtcaggaagacggaccttctgactttctctccaaggctttttgcacatcagctcttctgagcttgaagttcctgggaatgaaaaggaagattcccccagactggtcccatcttagccttaaggcgcgcaggatgggctctccgccacttggatttcttcctcttgggcaaaaggaagaacagggctgagctgaggaagagctccgctcttggactcagaagcacaggtctgaataactagaaggaccatttctttctctgtaaagtgaggattataatcccttctccacacaggaggcacttctcagttgtgtctgggaggggactttaaaaatctgaaatacgggcggggcgcggtggctcacgcctgtgatcccagcactttgggaggccaaggtgggcggatcacctgaggtcaggagttcgagaccagcctggccaacatagtgaaaccccatctctactaaaaatacagaaattagacgggcgtggtggtgctcacctgtaatcccagctactcgggaggctgaggcaggagaatttcgctcgaacccgggagccggaggggttgcagtgaaccgagatcacaccactgtactccagcctggacgacagaatgagactccattttaaaaaaaaaagaaagaaggaaagaaatgaagccactttgagcgtgaagggggagtgggcaaaaggaggcagcttccatggtggcctctggggagcctgagaccaagcactgggcctagcatgaggttggctggggaggagagaggagctcgtgccgcagcgggagtggtcacaggaagatccctccccaaggggtccctgtgaggccagagggatgctcatttttggggtggtgtggagtgagtgaggaaggaaggagggagatcaagtttgaggctgggggcagccagcaggcttggaggtcccagcagctgtaccctggcagtttgcagccgggacgtctctaaagcaccttctaactagaatacccgacctctgcccgtctcccctcagtaggcatgatgccaagtgggagccgctcaaggtggctttcagcctctttcctttttcttttctttgctttttactttgttttaatatttttagtctgcttgctaaggacctttttttttttttttctgagatggagtcttgctctcttgcccaggctggagcgcaatggcacgatctcagctcactgcaacctccgcctcccgcattcaaatgattctcctgcctcagcctcccaagtagctgggattacaggcgcacgccaccacgtccggctaatttttgcatttttagtagagacagggtttcaccatgttggccaggctggtctcaaaccgctgacctcgcgatccgcctgcctcagcctcccaaagtgctgggattacaggcatgagccacagtgcctggccaatgaactttttttttttttgagacagggttttgctgtgtcacccaggctggcgtgcagtggtgtgatcacgactctctgcagcctcaaactcctgggctggagccatcctcctgcctcagcctcctgagtagctgggactacaagcacgtgtcaccacgcccacctaatttttatatttttcatagagatggtatctcactatgttgtccaggctggtcttgaactatgttgtccaggctggtcttgaacttctggcctcaagcagtcctcccaccttggcctcccgaagtgttgggattacgggcgttagccactgtgccagtcctgagcctcctttctgagtgctctggtcacaggcgaggaggccagcctgggagtagctcctggaaagggggctggtgcggaaattcagaagagcctgtaccttagactcccaaagtgccagacacccggtggcactttaaatgtcgcagataaaacagtgagagactctcctggcaacaagcgagatgaggggccagggacctcagggcctccgaggctcagatttgagataaagaataaaaacatcacaggacgaggtggctcacgcctgtaatcccagcactttgggaggctgaagtgggcggatcacgaggtcaggagtttgagaccatcctggccaacactgtgaaaccccgtctctaataaaaatacaaaaattagccgggcgtggtggtgggcgcttgtagtcccagctactcgggaggttgaggccggagaattgcttgaaaccgggaggtggaggtccagtgagccgagatcacgccacagcactccagcctgggtaacaagagtgaaactccgtctcaaaaacaaacaaacaaaaaacaaaaacaacttggggaccccgtggtccctggtacaggggagaatgtcagtgcaccccagcccgcagggggagtacagaccctccaagctcacactggacaggcgaggcatcgggtgggactaggggcttcctgccctcgacgcctccacccactccaagtcagataaactcctttagggccagggctcagtgggaaatgccgccactcagggcgcagcccagaatctgcccacttatcacacaagcgtctgtgtccctgacagatggccaccagcctgcgtggagggcggggctcagccccactcttcactcttcctgagtgacagctgcgtgacagactctgctgcctctctcctgacaactaccatggcaattagataaagagggatttggttttctgccactgcctccttggctggtatgtcagctgcacatggggaggccctcgtgttcacccggcagtcccagcgctggccggggccttgcacatggccagggctcaaatctgttttgttttgtttcttttcttttcttttcttttttttttttttttgagatggagtctcactctgtcgcccaggctggagtgtagtggcgcgatcttggctcattgcaagctccgcctcccgtgttcacgccattctcctgcctcagcctcctgagtagctgggactacaggcgcctgccaccacgcccagctaatgtttgtatttttagtagagacggggtttcaccatgtttgccaggatggtctcaatttcttgaccttgtgatctgcccgcctcggcctcccaaagtgctgggattacaggcatgagccaccacgcctggcccgaatctattgactatgtgaatgtcccacactaggctgcatgagactgcacaagggagagaggcaggacgccgtgccagagaggcatgtgcacgtgtgtgtgcaaaagcctctccctaacgcggcgcccgtctgcatattttcctccttctgcctgtttggctatacggctgccccgcagagctgtgccctctctctccaagtgagactgtacatgtgcatcctttggggtcttgcttagagaccaccttcccctgcccatccagtccatgctattgtttcctctgtgggtttgtccccccggcctctcatcactgagcaagtcttacgtggcaattatccctccaatctctctggctggagtggcgcgtggccacctggatgctgccactcagagggcattcttgtcttgccagggactgtccccaaagcagtaccgggggtggggagaggagacacgaagcctggtgcctcctcccaacctcctacctgtgtaggcctccagcacttgtgtttccttcttccttagagtcggtctcctgggaaatggtgcttacagagatggaagagtttaatacatctcttgcttcctctctcttttccgaggccctcagagggagctgcagaagcagtggctggcgggggctctgaggcgcctgggtgagggaggaggggggtggcgtggagcctcagccaatttggaaagcactgtgacccaagcacatcttgcagcagcaatgtcaaattctgccgttcaggcatgccattagtgtgcacgctgccacacaggaatcggtgacacaaaggcacatccttccccaccctcctggagcttagaaactaacggctctaatgagaaatgagggcagagaggagagagatgggggcgggccccctccttgtgggctggcgctggtgtcagaggaggctgacccacttcttgtggtggtgaggggccttggcggccagcccactgaaatgccacttaaaccagccgctgctccctgcacgagggtctcctttgtccaaacccctcactcggcgctcttggagagagccctgtccccctggtagtacagctactctctctgcctcgcttccttttctcccccagggtcccttcacctcatgggctcttcagggcccagactcccctgccttcagcagccctctctggagagaccggcaggaccgcgcgagggagggtgctcaggtggccatgcgacgcgccgagcctctcttcttttcccggctttttgattgtgccgtgagttatttagccaacaatagatgtttatgtatttttttagagctcatatttattaacagcctgggaaggaggagaccgggagatttatacggaaagcacggtgagttaaaagggacaattagaggagcagaaagataccgagcatagaattctaaaggatattttaacgcacaatcaaaggttcttgagatattttccaagtagacagaaggtaaaagaaaattggcccattacgagctgatagtgggggattggtgatggggatggagtcgcggctgatggctgaactcctgcttagaggaaagtgaagttagagggcaaggcggggagctgaaccgggtcaggaggcttcagaacgggggctggaagggactccatcaaagcatgcacccacccctcctcaaagaatgaacaccagccaggtgcgctggcccagcctgtaatcccagcactttgggaggccgaggtgggcggatctcttgaggtcaggagttcgagaccagcctggccaacatggtgaaaccctatctctactaaaaagttaaaaaattagctgggcgtggtggctcgcacctacaatcccagcactttgggaggctgaggcaagtggatcccatgaggtcaggagttcgagactagcctggccaatgtagagaaaacccatctctattaaaaatacaaaaattagccgtgcacggtggcttgctcctgtaatcccaggttcttgggaggctgagacaggagaatcgcttgaacccgggaggtggaggttgcagtgagccaagatcgcgccactgcactccatcctgggcgacagagcaagactctgtctcaaaaaataaataaataaataaataataaaacaattagcctggtatggtggtgtgtccctgtagtcccagctaatcaggaggctgaggcaggaggattgtttgagcctcaggaggctacaaataaacgcagagaaagactgcctccctaggtcagcatagagtaggacaaataaacgcagagaaagactgcctccctaggtcagcatagagtagggcccggaggagctgggtccctggcagagaggtgggtcggctcatgggctggtggggcctgcctgggaagcgggcgtgcatgtccaggggaatttgctgagggctcggtggctccagggagcctccgcagcaaactccttccctctgaccccagtccctgcagcttgccctccacgaggcctcccgggctctcccgctccccccaacctgctcacaggccttcctggagcccattcaccgtggcggcagagcgctggtgattagctgggtgatgagtaaacatttgctaaatgggattcttggcttttgcaaagaacagccccggcaggagaggaggggtgcggttggtgggaggggctctggggctggctgatggtcacagcccgcacaggcagaagcgccggggtgatctgagctgctccgaagtcaggaggggctgagggcggccgcggctgggaagcagggagcgcaggccgtggaatgcttcccaagcttggaagcagcaggtgtctgggaatgggcctgtggcccaggcagacttccagcgagcgctccagcttgctggcaccaggggaggatctggctgagcccaggaggcaagtttccaccatgaaacccactgttgaagaaccgcggcaaggttgccacggtcagaaaccacgtgcctatggacaggctggggggggtgggcgggaggacgaccaggtcggggggaccgcacagcccctccacttccacggcagagtggagtccctgagcagagtcccctgggccgctcccatacagggcgcgtctcccatgccctcagctgggagtggtttgtggataccccagacacagtgctgttaccacctctagccctactccccacactcttctctgggtggctcctcatcctccaagactcattggagtgtcacctctgcctggaagccctctctgactgcccccacccagctgagctcctcattttgggggccgaggggtgctaccacaagcgccaactccataccagttgcgaatacttgtttctacatctaggctctgagctccttttgccccgagccacgtcttctcacgtttatgtccccagagcctggccagtggctggacacggaggtccctgatcagcccttgttgaatgaactatgcagagccagccaagctctggggtcaggggaggagcttgtgtgaaaggccttagagaccaccagtggccatccagcccctccgacaggggtggctctgtccccatcagtccacagtggaggccttcagtggccacccagcccctccaacaggggtggctctgtccccgtcagtccacagtggagaccaccagtggccacccagcccctccaacaggggtggctctgtccccatcagtccacagtggaggcctgtgtggcaggagggctgggagggagaagagatgactccctctgggggtccagggaaagtgggaagatggcagcggaggggtggcccccgcctctgggaagaccacaggaatctgcatctccatgccctgaaccagacgcaaggggctggagctggcgaatagagaagcttttgcctcgcccctgacgcgtccagttgctttgatgtttggggcgatggtgtcatcataactgcgtagcatgagctgctgagtgacaactgatgtcgtctgcaacagagctgccttgattccccctacctcttagaggagaaagctgctaaaaatacctggcgtcctgggcccccactgccttgcctctaataacagtcggcaaccagagactgtgctgtgcttgacagaagcggatcatttataaaacattagcatttctcgtactgacatttcacttccatattacaggacttcctaagtctttttttaaaaaaaaaattaataaagtgcttagactcttgattttcccactgagggccttgctgtctgaagctggaaatgaaatcaacaacacaacaacatccttgggttctaagggacagccaggccctagcacctcggcctgggtcagagcctgcaggccacaggggagcaggtgcaggctgaggattctttggtctgcagtcactgggctccctttagtgaatgccccaagcctcatactgaggaggatttgtccagccaggcctgaaaacacagccttcctccctctatccggggaaccctctcctttctctgaagccagagagacgtgtgcagtctccaagcccacccacagctgtccgggtgggtccctagcctcctggaaaactccttgggccccaggtactgactgtttccttgcagccgcccgtccccaccagccgcctgccgggcgccctgaggatcagtcacttagccattgctccggagactcccgggaataggccaggaaggacccaggaccagcctcctccggggagagccacggagatggtgccgacccggggcagtcagaatgtggaaagtgaatcatgatctgtgcgggcaagggaagtgccacgaaacggagcaccagggtgtgcgtgctctcatgtgtcccgtgaatcagtgcgcccctgccccctgcggctcctcccgccaacaaatgtgctgtgttcccagagctgtgcccggccaggctcgcccacccacagaagcccaggatctgccacctgtcgggaatgcggggttaggaaatgaaaaacagggttcttgtccaagatcatttattgttattattatttttctctcttaattggattcagcgtttctggctcctcacacacatcctctctggtgggggattcaggtttgtgcaaagcacaaaggagcttgtacccacctgggcccccggccagcagcacggccggctttgatcggagcccctcttccctgtccgggctcgcctgccccagtccctgcttctgacccctgagtccggcctcccgagcctctgcctgcaccctgagcatccccaggacggctgggagggccaggtcttccgtgatgcagaagtgcctgagatggttcatgaaatgccctcattgttccccttctgctaaggcccccgacgcctccctcctgctgtcccacacagggcccttgctgggtcacacaccaaacagcctcaaggaaaaattcagcagctgagccgtgcgggaggcctgggctcaagcccggagtctccttggcccgtccaggccgtcactgaccaaacgctaggctgacgacacggtccgaccctttggactaacactgtggatgctgcctggcctgctggtttccagatcccaaagccccttccttccccttctccatctcgctcaccctcggggcctggctccctcatatacaataagctgcttctcacttctcaccctgaagccaacagctacgacagcaggggtgacagggcgctccagggtggcagacaggcttgtgttgcatataaaaacaaggtgatgctctaaatatctaagaatattggtcccccaaagtgactcttgctgcctcccccttcctcaccgtcccgccgacaccttgccccaggcccttggcaaggccaggtcccttggagactatcgttgccagtttgggattctagacaaaaattctatcactttgtttttgctagaaatcaccaatacaatccttagttcagcaaatacagttttctgtatagtttataaacatgaaaagacgtacagttaggtaacggagtgggagggggactgtgcatttgtgtatatatatatatatatatatatatatatatatatatatatatgtagagtgtgaatatatataagtggacgtagttagttataaaactgcaccttctgtgagaacctcattgcccgggatgaagttctagatttcagcctctgatgatctttcctttggtaattggttcttggaccccagcagttggacctgggtctgccagggttgcctgagacatcaggaatgagaggcgctacccccgagggaggggctgaaggtggagtaggatagaattcagggcagggtgactggcctcaggcaagagccaagatgccacctgctcgtgtgtgcccagactgctggccacccagcctcgtgggtgagcctcatttgttcttctctgcgtcctgctttctccaggaaccacggggccctccagacctctcggaacgatcgggattccacagagccccggtgccgccgtcgggggcaattgtcccactgttgccagtggaggatgcacttggagtgccttttcccaccttgccagagtggacactgtccgtgggcgctctgcggggctggctgggacagccggctgagaagcgccaccccctcccgcctagggctgtacactttgggtttataatccacatggcagggtccagacgtccagacagcagccgaaggctctaccagccttttcctgaaacccagcagatcttccacttgttaaaaaaagaagaaaataaattctgttccttggtggacatgtggcagtgctgggtgctgacgccctgggtcctcagcggagagtgaccgccagccccagtgtccaggccaggagggaggcccccagggaactggccgaggaggcctgctgcaccccgctgggggcacggatgggggtcctgcgggcacacttgcccttcctcttgggccgggccgtaggcatgatgtcaaaactgaacttgtgctggtagtctggggcatagtctggcagctcgggggcctgtttcccggcgcccgccttagagatctgattgcggttcctggggttggtgcagttcttccccggcttcctgtggccgggccgggggccgtgcgggtggcccttgctcctggtggggccgtggggtgagtggtgttccttgcgggcggccctgtcggtggtggtgagcgtgtgtgacttgatctggtgcggggacgctggtcccgtgcagttccggaagtcctcggccctcagcagcttcaggtcctggccgtgccgcagcccaggggacacacaggggacagcggagctggagccccggaacctctgcagccattcccacagggagcgcgcgcgacaaccacagtcccaggggttgccgttgaggcggaggaactccagggcccccagcggggccaggcactcaccctgcagctccgagaggctgttgttgaagaggaagagggtggtcagcctgcggaggtcgtggaacgccttgtggtggacccactgcagctggttctcgtgcagcaaaagacggtccaggttcaccaggccccggaaggtgcccgggcccagactccacagcttgttgccgtggagaaacaggtggctgaggttgaccaggtccacgaagatgtcgtcctggaggtactcgatgtggttgtcctgcaggtagaggtactgcaggctgtgcaggccgccaaagacgccggccggcaaggcgctgagcccacacttgtagaggtagagggcgtgaagcttcaccaggccctggaaggtctcgggtgccagcgtccgcagctgccggttgtcgccgaggtccagctcctccaggtgcacgaagccctcgaaggtgctggggtggatgtaggtgatgttgttcgagtagatccacagggtgaccatggcggggctgaagtggccgggctggaggaggccgatgcggttgttctgcaggaagacgcgctcgctgtccacggggatgccctccgggatggctgcaaagttgtgcgcctggcagctgaccgtcatgggcgccgggtagcacacacagtcccgtgggcagccaccacccaggggcagctccgcagctaccaacagcagcagcaactccacacagcaccctggcagggagagagagcacagccaggtcaggggccgtgcaggtgaggactggcaccgcaccctccggcgcccgccgaggacgcatcctcgtcttggctgagctccgtgagagccttgtccctggctggagcaaggccagggtcaaggcccaagcctggaacccgtcggggatgagaggcctcccctccttggtgacccacttctgctgggctgggaggtgagtctggggtgaaggccccaatcacccccacacctccttagttccaccccacagctgctgagccccagccccacctgctccagctctgtcacactgctggggtgtaggtcatgacccagggacacagccgtcagcctcctgctctcctcctagctgtgccgctggttgttgttatctgtgctcacggatattgggaaggactcttgctctaatgtagtaaatatctcatgcagagtcctgaagaatctctatttatttatttttattttttattgaatttaattttttttttgaatggagtctcactctgttgcccaggctggagtgcagtggcgggatctgggctcactgcaacctccgcctccggggttcaagtgattctctgcctcagcctcctgagtagctgggattataggtgcgcaccatcacgcccaggtagtttttgtatttttagtagagacggggtttctccatgttggccaggctggtctcgaactccccgcctcaggtgatctgccttggcctcccaaagtgctgggattacaggtgtgagccaccgcgcccggccagaatctctttatttgaatcattcccaattacaagcacagcatgcatgcgtggcaccaaagttcacctcaaataatgtctcctttacatttacagtgtcttccacatcctcaaaacatacgggcaacaccccttctaagcctcagtttcctcatttctgaaatacagacatggccgggcgcggtggctcacgcctgtaatcccaacactttgggaagccgaggcaggcggatcacctgaggtcaggagttcaacaccaccctagccaacatggtgaaaccctgtctctactaaaaacacaaaaattagccgggtggctactcaggaggctcagtagtactcaggaggctgaggcaggagaatcgtttgaacctgggaggcggaggttgcagtgagctgagattgcactaccacactccagcctgggtgacaaagtgagattctgtctcaaaaaaaataaataaataaaataaaggccgggagcagtggctcacacctgtagtctcagcactttgggaggccgaggcgggcggatcacgaggtcaggagatcgagaccatcctggctaacacggcgaaaccccgtctctactaaaaatacaaaaaaattagccgggcgtggtggcgcgcacttgtagtcccagctacttgggaggctgaggcaggagaatagcgtgaacccgggaggtggagcttgcagtgagctgagatcgtgccactgcactccagcctgggcgacagagcgaaactccgtctcaataaataaataaataaataaataaataaataaataaataaaatacagacaatagcagttctccctggcagagctgtgtggatgtcctgagagggcgcctgtctgtgaaggtctgggggtggcaccagctgtcaggcgaggctgccccaatcccggcccaccttctggccactcccctctcccacctcactccagcctccaggctgtggttgcaaaaccaggccttgcctctcgactgtccagagcgtttcctctgtagcttccctctaattgggcattaattaggcattcgttaatggatccttaaaataatttattttccgatgtgtccagcctgtggtcggataatagccccgtgctcattattggagcaccctcattacggacgatcgtcattacctacctttttccagggtcccagctgccccaggcggccaggcaggcgcgccgaggttggggggccggctccaggcctccaggcccccaccctggagggccaggcagccatctcctccctacccagctagcctccagcccctttgcttctagctttccagccaggcctcatgggagagccggggcacccagggcagctgagtctctgctgcagctgtacccagagcttgtgggatgagagaaccaaccctctggccactctcgggccagccctgctcccggcctcgtgccgctgcctgcccaggctcacggcccagcaggcctcaccgccactgtcaccccctcgttcctggcagaaacagcctcgtaaataagtgacagctcccagctgttgggagttatgggctcccagagagtggcagctgcttcccgtcccctgtaatcacccggcttcgactgaacatttccaacacataaaaatcatcgtacataatttgttttttttgcataattgggctcggttgcgaattcagaggaattatgacttcagcggtggcggtggcacagcttcaaggaccctttctgggccaagccgtgctctctgtgctctctgcagtgacttctgtcccgcccagtgcacagcccgcaggctgggccgaggctgctgctgtttccccctcctacctcagtttcccctcctaccacacgtaggagatgatggcagtgtccaccgtctccacttggaggctcagatctggcttccagcccctgctgcctgcctccatctgcccaaggagacccagcctgcagggggaggcaggggtgtgttgggggaggaacctgggctccaaaccccacttgacttttgggaagcctgcccactgcctgaaccctccacacccagggctgggagggggccccaacccacaccagctgcaccttccacagagccgacactccccgtctctctcagctcacactcctcacccctcctcgggctgctaccctccaggaaggtgcttcccgcacctgtaggaagcttcctcccccagggagccgccccgctctgccaccctgagggagccagggtgcccctcctagctcaagggtgttcatggtgttcactgcttctcatcccacatctcaggcttttggggacggggccacagccaggccattctgcaaagacaaagccatttcgtcccttgggctgcagcaagagaggccttgcggcagggggacggggtgatatgtgtccggctcagcgctaatcccactcgacatttgcacagcttactggagtttacaaagtgcttctgctcacactcccctgagcctcaggactacccggtgtgctggggtgtggggagccctccttcacccactgtgtggctatctctgtaaggtccaggatgcagttctctgaaatgacacccggagaagctaatagcgggtcccacggagagacatttccccgtcagacacaaagcaggtgcctccaagggatgtcaggaaacaggggacaccaggcaaggaccccagtttaggtgaaaaagccaaatggcccccacatccaggagtgggcttggtacgtggctcgtgggtgtgccgtgggtgggaggggtcagagagcaggggtggagtgaagacccagggcaggaaccctcctgcccctcctctgagagggctccaggcttggtgcagggcctggctcacattcccggtctcaaggaagaacaagccattgtatcaggggcctggggcgggggccgggcaacaagccacaggcaccagtgtgggcagcccctcccgtcccagtgcctgaggatggtggagggcccctcgggggccaggcggtggggggggatccgagcccgggggagtgctcaccgaccttgggtactgcccagatgcaggggacccaccccagggaagctgtccttccaggcacccctgcccctcctcctggagagtagggatgtctctgctgagtgcttctgcacgctggaagttggtcccatctccaagacctggaccagctgtcccagctggccccgccgcctctggtaccccctgccagagccagtgggtgccccagtcttggacggtccccctgctgggtttctcccagggaggctggcgcagctttgccacggctcctctcatgcccctccatgcagcccttgggagccccgacccgctgattgcctgattaatgtgcagaagtgaggcccgagccttggcggtgcattttaagattgcaaattagcagggatcagactctctccggaggagccctgcacccctcccaccagcctcctcgtcccctcctgggtgggccaggggtggctctgccagagggggctgaggagagcaaggccgggcctcccccaaaactcccccaagctttccctgggggagtccccctgctcctcctctcctccaggggcacgtgctcggctgactgctcgggtatccccaaacctcctggcctcccacatgcctgagctcacccgcatctctgaggcctcattcattccctcctccattcaacacttgctgcctgagccccggggtgtggggggtgccagtggggagggcccagaatgactgggtggggggatacggaggatcctcatggctcactagcagatgggggggctcactaggagatgggggctcccaagagcaggcagtctggccaggtgctggggcctagggtaggcccctggaggtgtgtgtgggaagtgggggtgctcaggaaagacccctgccatccccgtgccacctgccaacattgttccgtcacctcctggagtatgaatctgggaaccagggagaagggtccctgcctcacagggttgccttaggattccagccagcacagaggaggcaaggagagctgtgttgtgttcaggtcctcctttctgcaaatccccaagtccctgcttgctggtcagggagcatgggggcagctcaggcgggtggcctgagcacgggaagccaccctacccggtccgctcagcagccccagatgtgcctacaagttgtcctgtgaggccacacctgccaggatggtgggaagggaaaggcaatggccacagcccgtgcgaaggccctgcagtgggaagggggcgacgtgccccttcctaccctggctctgtctctcaggctctaagtacacagagcctccaaggaggctgtaacctcagctcagctgggctgggggaacccagagccaggatggccagagatgtccccagtgggaccagccctcacagggcccttgccccaggcccaggccggccagccacagctggtcattgtggagggcactctgcagcttcccggcccctggaagcaggacaggaccaaccaaggcggacccagccctaactgtgtaccagagtcctcaggacagcccccatttcacaaaggaggaaacgaggcccaccagggtaaggcaccggccacggcacatggctggcgacagggcagcgagcaggcctcaacccagctgactgcaagtccagggctctgcccccagctccatcctgcacgtggtgggcagggcgtcctccacgaagggctggttggccctcataggccccagagcctcgagctgctcaccccaacttgccagcaccgaagggactgcccctccctgtgcctgagcagggctggccccatggctggtatccccgcagccccctgggcagggccgtggggctctctgggtcttggagaccggtaagatccctctggctctgcagccctccctctctccccctccccgctttcccagtcctggcagattggcagatcctcctctctatgccagtcgatgctaacccaatgctctctgctggtcagataacagcctcaggccaggccggctgcacttggggctgctggcgccttaggctacttggcactgtccctccatgctgcacccaagcacaggccacttcctggtgggcccatcatcccctctgcagccccgcctggagcctggctcagccctggagacatggaagccagccagcgcacagctgggcttccctcgtcctattgctggacgtggggcgtggggtgtgcaggatgggcaggggctccttgtccatggcatagggcattggaaagagcacaagctttggagccagagagacctgagtttgaatcctattttttttttaagacacggtcttgctctgtcgcctgggcaggagtgcagtggcacaatcatagctcactgcaacctcaacctcctgggctcaggagatcctcccacctcagcctcccagacagcttggaatataggcccacaccaccacgctccgtgaattttttattttttgtagcaataggatctcactatgttccccaggctggtcttgaactcctgggctcggcctcccgaagtgctgggattacaggcgcgagctacctcgcccagccctggatcctcaacttaaccggtgtgtccccacgcttgtgtgagcctcatcttcctcacctgcaaaatggggcagtcatttaaagctccagcgtggccctcttgtctgcggacgtcggcctcccccacatctccatctgtcacacgaaagcctcccaaactgagctctgctcttcccccacaagcctcctccactcgcatataatccatctcagtcagacgcagcgccttcatttcagcttctccggccaaacaccttagaaatattttagacagagtctcgctctgtcccccaggctggagtgcagtggtgcgatctcggctcactgcaacttccaacctcctgagttcaagtgattctcctgcctcagcctcctgagtagctgggattacaggtgcccaccaccacacccggctaatttttgtatttttagtagagacggtgtttcgtcatgttggccaggctggtctcaaactcctgacctcaggtgatctgttcaccttggcctcccaaagtgctgggattacaggcatgagccaccgtgcccggccaacttcaaaatgtattacgcaactacccacttctcatggccaccaccctagtctgggcaaccatcacctctcacctggactattgcaataggctcctaagtggtccctctgccccaacctcgcccctgtatctcatctgacacagtaggcagggagatccagcacccctctgtggctcccatctctctcagtaaggtccctccaagtctgttctgtggcccagaggcccagttggatctgagctgccaccccctccttccctccccagccgcagtggcctccctgatacaccctattcacgccagggatgctccacctctagccttttgcacgtgctgttccctctgcctggagcgcttcccagggtgtctgggggactcctgccctcaccccaccattcgcagctgtccctgcctcttcctcaggtgccccaagtcccctgaggccttgtctgagcaacctggtggttttgttttttgttttctgtgacagaatctcacctatcacccaggctggagtgcagtggcacgatctcagctcactgtaacctccacctcccgggttcaagcgattctctcgcctcatcctcctgagtagttgggattacaggtgcccgccaccatgcccggctaatttttgtatttttagtagaaatggggtttcaccatgttggccaggctggtcttgaactcccaacctcttgatccaccgccttggcctcccaaagtgctgggattacaggtgtgagccactgcgcccagtctttttttaaaaaatagagatggggtttcactatgttgaccaggcttgtttcaaactcctggcctcaagcaatcctcccacctgggcctcccaaagtgctgggataaccgttgtgagccaccacgcccggccgccctgcttcactttaccccacagcattccccctcttctaatacactacgtgatttccttatttttcttattgactttccatctctccgcactgagtgtatgttgactccgtgaggacggtggttttgcctgctgtgttctccgcagtaccctcagggcccagaacactggcatccagcaggtgacctgtcacaatggctggatgaaggaagaatctttctgagtcagcagggggactgagagatgctgctcaggaagccctaggcccagggcctggctcctagcaggcgctccataaacagaggggcgcttacccaaagcgaggagactcagagcctccagggtgagagcagagactaggccctggctctatctggaggcttcctggtcaatcacggggtgaccacacggtgaggagagctctgggaaggaggatccagccccaggccagccagaggcccagggcagggtgaccagggcaggtttgcctgggacagaggggttttccaggatgtgtgggactttcagtgctaaaaccaggacagtcccaaacaaaccaaccaaccaggacaggtcagtcatccaggtcattcaggtcaggcaaatccaagcctgtgcctccctcaacaaaaacctctgaatgcaggaaggggaggggcacacaggcaggcacaaggcacgtgtcttctcaaacaccatgcgtcccgctcagtccctgcagccaggaggccggcctgggcccagactgagcctgtgcgtggtgtgtgtacctgtgtgtcatgggcatgtgtacgtgtgtgcacagggtctgtgtccatctatgttgaatgtgtgtctgtgggtgcacggggtctgcgtggatctatgtgtgattgtgtgtctgtgtgtgcatggcaaatgtgtgtgtctctgtgtgaatgtgtgtgtgtgcacggggtctgtgtgcatctatgttgaatgtgtgtctgtgtgcacgtgtgtctgtgcatctctgtgtgaatatgtgtgtgtgcatgtgtgtctgtgtgcatctctgtgaatgtgtgtgtgcacggggtctgtgtgtgtctctgtgtgaatatgtgtgtgcacggggtctgtgtggatctatgtgtgattgtgtgtctgtgtgtgcatggcgaatgtgtgcgtctctgtgtgaattgtgtgtgcacggggtctgtgtgcatctatgttgaatgtgtgtctgtgtgcacgtgtgtctgtgtctctgtgtgtgcacgtgtgtctgtgtatgcacgtgtgtctgtgtgcatctctgtgtgaatgtgtgtgtgcacggggtctgtgtgcgtctctgtgtgaatgtgtgtgcatggggcctgtgtgcatctctgtgtgaatgtgtctgtgtgtgcacatgtgtctgtgtgcgtctctgtgaatgtgtctgtgtgtgcacggggtctgtgcgtgtctctgtgtcaatgtgtgtgtgcgcacggggtctgtgtgtgtctatgttgaatgtgtgtctgtgtatgcacggggtctgtgtgcgtctctgtgtgactgtgtgtctgtgtgtgcacgtgtgtctgcgcacgcacgcttgtgtgctcatgtacctgggcgggcctgtgtttacatgtgtgtgcacagctgagtgcacgtgcaaagccgatgcatgtgtgcaaatacacaggtatgcacacagaaacacatgcctgtctcgggactgtggatagggtggcggcccggcccccttcaccctgcagcgtgcctcgctcaccctcctgaaaagggagcggggccctgttctgggcagagccacccatcccaggtcttatctcggcactggctctggtttgccttcaactcccgccctcctcccgacacgctgaattatgtacccactccaggtccctccagcacgccaggatcgctctcagctgagaagtgggcggccccttattggaatagcctttcagctttcatctgcctcgctgggcccctggagcaggcctggctgggaatgccgtgctaattaggccgccacattctcagggggccttgtcggagccacccccagctcccctaccctctgcccatcgggtctccggtctccttgctgtgaaggtctcgcatggggtgggggctggacgctggcactctgacagctctggacccacgtactgcccaggcttgagaccggcccccgtggcagcacattgcagtgggatgaccttgggacaggcgctcagtcctgaggtctgggaactgcgggtcagagcggctggctcctcaggtgcactcagtgggacagggctggttgtacgggtggccctccctaagccgtgatgattacgttactgctagtgttaccagagggagctgcccccactcctgcttagggctctcccaacccccagtggaccctggaccctggatttcactccacccaccctgatgcacccaacccgccgcagaaagacctgacatatcagatgccgagaaggggctttagcccagggctgagggtccctgccaggctacggctgcaggtggaaacagcgcactgacctctctactgggccctctctccccatcgagccagccccacctggtcctggcagtgctctgcaggaagcccagggcccgtggcctctatttccacctcctgtagcccctgctttccagggctcataaaatgtgtcccgttatgcaaatttgctcccaggtttgggggccccagaacctgagttgtggcagcgcagactccagggctgaaggccgagggcttctgagagcttgcccttcccaggaggtttcagtgaaggctctgggccctgcgtctgagcttggcaccttgtggagccaactgcccctcccccaaagctacagctaattgtggaccacccactgccggacaggcagacaggcagacaggcagacacaggcagacaggcggacacaggcggacgggcagacacaggtggacgggcggacgggcggatgggcccaccaagtcctcagtgataccataggtgtgtttagtggggcaggggttacctccgtggcgacgagaccgtcctcggtggcaaatgtctgtttgtgatgcctgcctgggggtccaggaggggtgtgagggggagggcgtggggtggggacctactgttttcttttctttttcttttttttttttgagacaatctcagtcgcccaggctggagtgcagtggtgaaatcttggctcactgcaacctccgcctcctgggctcaagtcattctcctgcctcagcctcctgagtagctgggattacaggcacctgccaccacgcctggctaatttttgtttttttttgagacggagtctcgctctgtcgcccaggctggagtgcagtggcatgatctcggctcactgcaagctccgcctcccgggttcaaggcattcttctgcctcagcctccagagtagctgggactacaggcgcctgccacgacacctggctaatttttttttttgtatttttagtagagacggggttttcttgtgttagccagggtgttctcaatctccgaacctcatgatctgcccgcctcggcctccctaagtgctgggattacaggcgtgagccaccgtgcctggcctaatttttgtatttttagtagagacggggtttcaccatgttggccaggctggtctccaactcctgacctcaggtaatccgcccgcctcagcctcccaaagtgctgggattacaggcgtgagccacaacgcctggccaagacccactgttcttgaaggccctggtgctcacgggcaggccaaggtgtcaacaatgcaaaacaggagctgggagcctgcctttgagaagcaggtgcagaacgccctgccagggtccttgttccccagccccgaagacccgccccttccctgcgatcagtgaaaggcattcagaaccggcatctagagctctgagcgcagcccagatcctgtccatcacccggttctgaatctatccccactccttcattcacgagagtgactgagctccgggtttgcttccacagcagcaagaggctcggctccttccctcctggggcctacattctcctgggggtgcagtcaaaataaaggaaccagataagccccaaatgacggatcatggtaagtgctggggacaaaaagggttgagatagagacaaaggaagggacctatcttagctgtgtgctcttggagggcctccctccctgggcgacttctgaattgaaacctaaaagataagaaggagctgaggaacagcattccaggcagagggcacagcaggtgcaaaggccctgaggcaggactgagcttggcttggacaagggcagaggggcaggagatggggtcagaacagcaggagccaggcctcgtatggcctgaaacaccaccagaaagggtttggatctaattctgagtgtgatgagaagtcactgaagagcccggggcgggagcaacaggattgggtttggatttgggaggttgcatttggagggtgagttgggggggagcaaggagggaggcctgtggccgtgagagaccttgggggcctgaagagggcaggggccatggagacagacagtgctgaatggaccggacagatgccaggatggggcccgacaggacacactgacggatcagggtgagggaggcgacgggggtcacggggcggcttcccaagtctattccagaagacggacaggatgagggtatcactatgagactggaggaataaaacaggaaaaccggctcagggcagccagggcacagctgaggatgcataacgtccgagaagccttagagagatgtttagttggctgcagctggaagtacaaaactgaagcccagaggttggctgtacactcaagagctgtcggcacagagcgggcgtgtaaattggtgggaatgaagccggggcagcagctcacgcctggaatcccagcactttgggaggctgaggcaggtggatcacttgagttcaggagtttgagaccagcctggtcaacatggttaaacctcatgtctactaaaaatacaaaaattagacgggtgtggtggcgcgcacctgtaatcccagccacttgggaggctgaggctgagaatcgcttgaacccccaaagcaggggttgcaatgagctgaggtcacacccccgcactccaacctgggcgacagagtgagacacagtctccaaaaaaaaaaaaaaaaaaaaaaaaaaaaggctacttggcaacatactgagactctctctctctctctgtctctctttctctgtgtgtgaaaggaagtttgttaagaaagtaaaggaactaaagaatagctactccatggctgggcgcggtggctcacgcctgtaatcccagcactttgggaggctgaggagggtggatcacgaggtcaggagatcgagaccatcctggctaacacggtgaaaccccatctctactaaaaatacaaaaaattagccaggtgtggtggtgggtacctgtagtcccagctactcgggaggctgaggcaggagaatggcatgaacctggtagaaggagcttgcagtgagccaagatcacgccactgcactccagcctgggcgacagagcgagactccgtctcaaaaaaaaaaatattaaattttattaacaaaaaatagtaaacaaacaggattgaggcttttcgcgacacaatgcttttgtggaggggaaaggaggagtcagccaaggagaaggaaccgccagtaaggtgagaggaaaccaggaaagtgtggctttaccgaagccacaaagttttttttgttgtttttttgtttgtttgtttttttgggacagagtctcgctctgtctcacaggctggagtgcagtggtgcgatctcggctcactgcaacctctgcctccgagttcaagcgattctcctgcctcagcctcctgagtagctgggattacaggcacacgccaccacacctggctaacttttgtatttttagtagagatggggtttcaccacatgttggtcaggctggtctcgaactcctgacctcaggtgatccagctgcctcggcctcccaaagtgctgggattacaggcgtgagccaccgcgcccggcccgaagccacaaagtttttcaggaagagggataatcaactgtgatgaggactgccgaagactaacgtgaggacagagaagcgccccactgatttggcgacttggaggccactggaaagttccttcctggcagaaaggcggaggcagaaggcatatggagtgggatgaagatcgaatgtgagtgaggtgggggagccaggacaggcgggtggtgctgaaatcacgagggactcagaattctaatggctcagggacagcaggacggctgaggctctgctccaggacctgggctgagagggcaccctctacccagaagctgctgctctcctagcagaagggaaagacttgtgcacgtggcccttgcccttttgtttcaaacgacacatgtctctcctgctcacatttcattggtcaaagtaagtcacggggtccagctgccatcatgcacgaatacccccaggggagtttggggaatagtgaatatctgtgagcacccagagaccacgctgcatgacgttttgccatgaggggcagcggagaaacggggctggacttggaggggcatgggtcaagggaggttggttttttttttttttttttttttgagatggagtgtcactctgtcgcccaggctggagtgcagtagtgcgatctcggctcattgcaacctctgcctcccgggttcgagtgattctcctgccccagcttcttgaatagctgggattgcgaatgcaggcatccaccaccacgcccggctaattttttcatatttttagtagagacggggtttcatcatgttggtgagactggtcttgaactcctgacctcgtgatccacccgcctcagcctcccaaagtgctgggattacaggcgtgagccaccacacccggcctctcctcccccattttcattctgcacaggtccacccaacccccctcctcttggcaatcaggatccaaatttccttcagaggcaaccatgtgctcctctagaggagccgggctcctctcctgccgggggtgagtctttgtctacttcactgtctggggttggtttaaacaggagcatgtaatcccagcactttgggaggctgaggggggttgatcacctgaggtcaggagttcaagaccagcctggtcaacatggtgaaaccccatctctactaaaaatgcaaaaattagtcgggtgtggtggcgtgcctctgtagtcccagctactcgggaggctgaggtgggagaactgcttgaacccaggaggcagaggctgtagtgagccgagattgtgccactgtattctgggtgacagagtgagatctagtttcaaaaaataaaataaaataaaataaaataaataaatattaaaaaataaaaattaaggcgagacatggtagctcatgcctgtaatcccagcactttgggcggcaaagatgggaggattgtttgagcccagggtttgagaccaacctggacaacatagttagaacccatctctacaaaaaatacaaaatcagctgggcacagtggcatgcacctgtagtcccagctactcaggaggctgaggcgggaagatcacttgagcccaagagcttaaggctgcagtgagccatgattacaccactgtactccagcctgggtagagcgagatcccgtctcaaaaattaaaattggggggagggatagcattaggagatatacctaatgtaaatgatgagttaatgggtgcagcacaccaacatggcacatgtatacatatgtaacaaacctgcacgttgtgcacatgttccctagaactcaaagtataaaaaaaattgaattaaaaaaaaaatttttttttgagacagagtctcactctgtcaccaggctggagtgcagtggcgtgatctcggctcactgcaacctctacctcctgggttcaagcgattctcctgcctcagcctcctgagtagctgggattacaggcgagcaccaccaagctcggttaatttttgtatttttagtagaggcggggtttcaccatgttggccaggctggtctcgaactcctgacctcaagtgacccacccgccttggcctcccaaagtgctgggattacacgcatgagccaccgtgcctggccattaaattttttttaaaggattgggagatacaaggaagagatgttctacctcctgcctctgggtgtggctggacgagcatgaaatgcatggccctgaagccccatctttcaaccatgaagggaccagcccaaaggctaatgtcagcttgccaggactacagagtaaaacggagagaacctgtgtccacagtgatcttgttaagccaatgagtcaaccaatgctggaatttccaaacttcttgtcatagaacatggtagtatgtcctctttctgtttaagccattttgggttggattttcaattacttgtgtccagaagtgtcccaacacgccttccaatgagttccttttttgctcagtcagtcagacaagatttctcttgcttactactaaaaaaaagtctaacttacatactgggcaactctgtgatttggctcagatgggacctgctccagaagcctccctggactcactcttcctttcctttcctttcccttcccttccttccttgcttccttccttttttttttttttttttttttgagatggagtctcgctcttgccacccagactggagtgcagtggcacgatctcagctcactgcaacctccgcctcctgggttcaagtcatctcctgcctcagcctcccaagtagctgggattacaggtgctcaccaccacgccaagctagtttttgtatttttagtagagacggggtttcaccatgttggccaggctggtctcgaactcctgacctcagatgatccacccgcctcggcctcccaaagtgctgggattacagacaggagccactgcgcccagccactcccactctcttctctctccaccccagaggcgcagcactgctgcgcgtccaactggttcctggtacatagaggtcatcctgctgtctgtcaagtcaatgaatgaatgaatgatttagctgatgtcattccagtcaaaagcaaaaaccccaggtggccttattgtgggtaaatggagatatataataagttgcagcagccagacgaccccagggtaggtaacttatgcttacaggataagttgactaccagccatttccagcctcagctcacagataattctcctcggaccctctgcaggatttctcctcactggctgcttgagatgcctgcagtctctaagaatctccggtcccaggccttaaattaccttctcttctctgtcagcctgagcgccgccctttcactagggacctacctctcaccagccacgagcccctgccagtctgtgacctcaggcccaggaggttgagcccaggtagcatttagcataggccttgtgtgcggtccccaaccctatttctccctgtaaggtttttatttaatatcactcatctttatttactttcaaaataatacttgccagggctgggtgaggtggctgacacttgtaatgccaataatttgggaggtcaaggcaggaggatggcttgagtccaggggtttgagatagcctgggcaacatagtgagactccatctctataaaacattttaacaatgagccggctgtggtggcacatgcctgtaatcccagctactcaggaggctgaggcgggaggatcacttgagcccgggaggtcaaggctgctgttaaccatgatcatgccactgcactccagcctgggtaacagagtgagaccctatctcaaaataataataataatagttattattattactattattattttttgagagaaagtctcactctgtcgcccaggctggagtgcagtggcgcgatctcggctcactgcaacctccacctcccgggttcaagcgattctcccatctcaacctcctgagtagctgggattacaggcgcccaccaccatgcccggcgaatttttgtatttttagtagagacagggtttcgccatgtaggccaggctggtctcgaactcctgaactcaagtgatccgcccgcctcagcctcccaacgtgctgcgattacaggtatgaaataattattattgaattaaataagacttgccagttgtggaaaacatgaaaagtatagaagtaaaaaggaagaaaaatcactacagtcccattacccttgacaaccattgacagagccttgctgtatcttctttcaatacttccctttttatatggagctatataaaatttaaataaaaattttatttaaagaaataaaattgggatcatgctatatatggagttctgtatcccgcattttctacttaagaccattccattcattcagcagctctcagggggtctctatctttgaggctgtgtactaaggaagcagcaggcagctcagcaggcagaggggccccaccacccagcggggtgcaggcgaataggtaaacaggcactcgtcaaacaccacgcccagatacaatcgcagctcctaacgcgtacggcgaaagatccaggtagctatgagaactgcggggtttccctcatcagtgggggtgtgaagccttggacagcctcggagagtcatcagtgggggtgtgaagtcttggagagtctgaaggctgaggactcaagtgggggcctggtgggggggcgggttccagccagaagcagtagtctaggctgagggcctggggccagaggcaatgcacagttacttaacagaagagggatgcggtaacaggcacgatgtttagagactgcagagtatcccactgcatggacagactgtaatttatttatccgtgaaagagttagatcgtttctcatttttcactgttacaaatgatcatggcagaaattggtaacagttgcctcctgggagggctgcaggggagctcagggtctggggtgagggaaacatcactgcatacctgtcgggaacttttttttttttttttttttttaagatggagtctcactctgtcgcccaggctagagcgcaatggtgcgatctcagctcactacaacctctgcctcccggttcaagtgattctccttcgtcagcactccccgagtagctgggattacaggcgtccaccaccacgcccggcttttgtattttgagtacagacgggttttcaccatgttggccaggctggtctcgaactcctgacctcaggtgatccacccgccttggcctcccaaagtgctgggattacaggcgtgagccaccgcgcccagccaggaacttttgatgtattaccacatgactgtatctattgattcttttcaagagtcagttaaattaaaactaaataacgttggaatgaacatctttgtgctcacggcttggttcaaatacctgatcctttccttagatcagattggttgagtccaagtgctcctgacatttgctgatgagtcacctttcagaacattcagctcctaaaacctcaagttctacactcggaaaatcaccagctgtgggagctctcagagattcaaccctttcctctgtttgccttcccaactggcccgtgagctatgtaaaacagaccaggcccgtgagcctcatatgaagaggagaccgtggggaagggaagggggttaacatgtgctggaccccttctgtgtgccaggcctacccacgctgggggtgtccacatacacgctttgaacagtctcctctcaattattataagggtattaatagcctcattttacacttgagaaaaatgaagctcaacaaagtgaggtggcagggccgggtgcagtggctcacacctgtaatcccagcactttgggaggctgaggcgggtggatcacctgaggtcaggagattgacaccagcgtggccaacatggtgaaaccccgcctctactaaaaatacagaaattagccgggcatgttggtggcgggcacctgtaatcccagctactcgggaggctgaggcaggagaatcgcttgaacccaggaggtggaggttgcactaagcctagattgcaccactgcactccagcctgggcaatagagtgagactctgtctcaaacaacaacaacaaaacaaacaaacaaacgaacaaacaaacaaagtgagatggtgggttgcagcactcacacctgtaatcccaacactttgggaggccgaggcaggaggatcacttgagcccaggagttcaggaccagcctgggtaatgcagtgagacccatctctacaaaaactaaaaaaataaaaaataaaaaaaaattagcccggcatgtcagggcacacctgtagtccccgctacttgagaggctgaggaggatagcttgagcccaggagttcaaaggttgctatgggttgtgattgcaccactgcactccagcctgggagacaaagtgagattgtgtctcaaaaacaaaaacaaaaataaaaccaaagcgaagtgatttgtccaaaatggtggagtcaagattcaaacaagattgccgtggcatccgaccgtgggaggagacatctctctccttagaggccgctgctgcacagagacccctctcccagcatcggcccccgccagtgccccaccaggcaccccgtccccacctcccatgagccgtgtctttgctcccttgccaataacttcattcctcccctgttttcattattaattccctcttcttgtgcttcacactcatgaggccggggaaatggacaaggcggttggggaaggaagtggaaattctgtgtaataccatcatcggtatcacaaaacttgtcttaagtgccagccccagggatttgctggagttggcacgacagaggtggggctgaaggtcagattaaattggactagtaaccccaggggatacttgaaagaggttgctaaagaaacagttccggcaggatcgtgcagcagctgaggcaggcagctggcagcagcgtgcgggccggccggccagatcaagcctgcttagcagggcttgctggtgacaggcctgggttcacacgtcctcctccggaagcctgaaatcttgccttttccccccaataatgagttggtataaaaatggatcttgaataaaattgtctgcagttttcaaatttcaaactgcattagtcaaaatatatcaaatttccatgtactgacttaccacctgctcaaaatctgatcctttttcagctggaatatattgaaatatgaatcacctcctgagaggcaaaagggaaaagacgcggagggtgaggccctctcaaaacacgccggtgggcgagcgggaatcctgggctccgctgggctcccccggcctccacctgacaatggctccttttatttccggggtggcccaggcctcttggccacttcccttgatcctaggtttctggctgagacccttatactctgggcagtctatggcacacagtgcagaaactaatcatttcatgcctctggcctttaataagcacctactatgtgctgggtgctcagactcaccagagaggcagtcctatcatggtattgctgaatctaatagtgtcttcttcatcctaatctgctcaccttggcagcactggacacagttggccctcccctctggaaactctttcttctcttctcttcagagacctggctctgtcgtcttgtctgccttgctgcctgcttcttcttggtctgctcttcccggcctgatgaccacatacacctaaatccccagagctcagcccttgaaacttctctcttctgtagtcacacctgtccccaggtgagcttgtccaggcccaagtctttgttttgttttgttttgttttgaggcagagtctcactgtgtcacccaggctggagtgtagtagcacgatctcggctcactgcaacctccacctcccatgttcaaacgattctcacacctcagcctcctgagtagctgggattacaggcacccgccaccacgcccagctaatttttgtatttttagtagagacggggtttcgccatgtgggcccagctggtttcgaactcctgacctcgtgatccacccacctcggcctcccaaagtgctgggattacaggcgtgagccaccgcgcccagccaggctcaggttttaaataccatcttcataggggtggggattagacatgtgttctggctctaaactgcagaccagtccacccgcctgcccgcctggcactgccacgttagtatctaataagcagctcaaactccgattgtcctgtgttcaccgtgtaggcttccctgtctcagcaggtgacacctgtagcatttcggctgctcaagctggaaatgcaggtgttattctccattcttccctttccttcatcatctcttcctttaatccactaagtcccactggccccaccgtcaaaatacatcccaaattcacatcaccccgcccccaccacccccaccctaccctgggccactctcttctgttccctggacctctgccgtggccaccctcactggtctccctgtttatattgcagccccatcaccacccacagcctaagcacagccagaaggatcttcaaaaacagtaagtgctatcatgttactttcctgctcgaaatcttcagtggctttccattgcaccagaataaaatgcaggctgctcaccagcccacgtcgccctcgtgagcggccccacctccctctccagccccgtcctgcgccactcttcacagcgctagctgcactggcctctgttcctagaccacagcgagctcattcttgccttggaggctttgttttcttgtaaaatatacacatttttattacaaataaataactaaaagttaacattttaaagcgtacaattcactggcacgcagcatattcgcaactatcatcactatctggctcagaacgttttcctcaccccaaaaggaaactccatcccccttagcagtcactccccattctccctcccccagcccctggcaaacactaatctgctgctttctgtctctgtggattggcctcttctggatatttcatacaaatggatcatagcacgttggcctcggagttttcacactgacggttcccacggggccctctctgccccaggcctttgggggaccatctccttcttaacatttgtcttggctcaaaagtcacctccctgtctccagccgatgcccacggcccctctgctcctggccactctcaatgtcataaggacccagccctatttatttccctttcagcacctaacactctctgagagcaccttgcttaattatttgtttacacatttattgtctttccccttgtcgctccctgtgatatccccatccccgggacagggccaggcacccaggtagtgctcagcaattatttgtggattgaatgagccggttcactatcaagcactcggatgaagccatctacaaagataaagaaacagccaaggaaggaagaaagcggtgctgctggggaggggaggagtaaccaggaaaagtcacgaagggaaggggggcctggaaggatgactagaagctcagctggccttcggggtggaaggggcattggaggacgacggggcagggcattccaggcagaaggaaccgcatgggcggaggcctggaggcgcgagagagggagacagcagtcacggtaggagtcacgtgacggcctctctagtttgcaatttgtcccctaactgattggcattcactggcctcccacagagagaacatttaacacaggtctgggagttgggtttgatacaacacgtaagggactgagaggaaagaaagggtggagtctcttttgttcgtttcttcttccctcctcccactcttgtcctagtgtgctctggacaccccacagacacaaagaaaagtaggccggggccaggcgcggtggctcatgcctgtaatcccagcactttgggaggccgatgcgggcagatcacttgaggtcaggagttcaagaccagcctggccaacatggtgaaaccctgtctccactaaaaatacaaaaaaaaaaaaaaaaaaaaaaaaattagcagggcgtggtggcatgtgcctgtaatcccagctacttgggaggctgtggcaggagaatcgctcgaacccgggaggtggaggttgcagtgagccaagatcacaccattggactccagcctgggctacagagcgagactctgcctcaaaaaaaaaaaagaaaagaaaagaaagaaaagaaagaaagaaaagaaaagcaggccgggcgtggtggctcatgcttataatcccagtgctttgggaggctgaggtaagaggatcacttgagtccaggggtttcagaacagcctaggcaacacagcaagaccctatctcttaaaaaaaaaaaaaaaattagccaggcgtggcacgtgcatgcagtcccagctactcaggaggcagaggtgggaggattgcttgagcctgggaggtgaagactgccatgagccatggtgcgttactgcactttatcctagatgacaaatcaagaccctctctggaaaaaaaaaaaagaaagtaagaaaaaagaaaagaagtaagaaagaaaaagaaaaaacagactagttaccagttttctttttatttacttattttttgagatggggtctcactctgtcgcccaggctggaatgcagtggtgcaatctcagctccctgcaacctccgtctcccgggttcaagtgattctccctgcctcagcctcccgagtagctgggactacaggtgctcgccatcacgcctggtgtagtttccagttttctgatttaaaatcatcttgtaaccaccttttaagagtcatgggaaggccaggggtggtggctcacacctgtaatcccagcactttgggaggccgaggcaggtggatcatttgaggtcaggagttcgagatcagcccggccaacatggtgaaacctcgtctctactaaaaatacaaaaactagccgggcaggatggtgtgcctgtaaccccagccactcgggaggctgaggtaagagaatagcttgaaccaggaggcagaggttgcagtgagccgagatcgcaccactgcactccagcctgggcggcagagggagactcgatctcagaaaaaaaaaaaaaaaaaagagatgtgggaaggtagggagggcaatgaagtatattacagatcattgccaactctattttattttttttttaagagacagggtctcactcagttgccctggctggagtgcagaggtataatcatagctcactgcaacctcgaactcctgggctcaaacgatcctcctgcctctgcctcctgagtagttggaattacagacatgagccacagcacctggcttgtcaactgtgttttaatggtcagaggagggtccccgctctttgggttcctaggaggaaggcagagctgggatggacctgggatggcttcccattggccctccccagcctcatctttctgggctgagccaccagcccctctgggcgtagagctgtctgtgagccccgtgtccttcatttctcttgattgaatcaggcctggctgacccagccccgtggctctgggagtccagctgagctcccaggaggagaggcccttgcccaaagccaggaggctcacaagggcaaattcaattgtgggcgaggtaggagccattaacctgtctgtggactgcagctcccccaccttctctccctctgccagccaggcctgtccaggctgcctctgctggatccctactgcccgccaccttcaggggctccctgctgcctctgggctgtgtccacccgcctttgccactcggcaccccatagctgtcatcacctgggcctctaggatcagagcggattttgaggtgagaaggagaacaaatctatgggaatttgcacttcaccatggaggcaaaccaggctcttggcccttcccaactctcaagcttccgggtgcaatctgcccttcggagttttttctttttctttttctttttttgagacagtttcgctcttgttgcccgggctggagtgcagtggtgcgatctcggctgagcgcaacctccacttcacgggttcacgccattctcctgcctcaggctcccgagtagctgggatcacaggcgccaccacgcccggctcattttgcatttttagtagagacaggatttcaccatgttggtcaggctggtctcagactcccgacctcaggtgatccacctgcctcggcctcccaaagtgctggattacaggcgtgagccaccgcgccgggcctgcccttgggagttctaatggggaggaggtcctggaggcaggtgggagtcacttgagaaaagcgttctggggtctcaagcctccggaacagtctggggctgcgctgtccagcatagtagctgctacgcacacgtggcttccaaaaacttgaaatgtgctcacttcaaagacttagtaagaaaaagaataaaaatacctcatgaataattttatattgattgcatgttgatattgcaatatcatattttgaatatatttggttaaatataaaaatattttaggcccagtgtggctcctcacgcctggaatcccagctctttgagaggctgaagtgggagggttgcttaagtccaggagttcgagaccagcctgggcaacatggcaagacccccatctctacaaaaaatttaaaaattagccacacaggtcgggtgtggtggctcacgcctgttatcccagcactttgggaggccaaggcaggtggatcatgaggtcaggagattgagaccatcctggctaacatggtgaaaccccgtctctactaaaaatacaaaacattagccgggcgtggtggcgggcgcctgtagtcccagctactcgggaggctgaggcaggagaatggcgtgaacctgggaggcggagcttgcagtgagccgagatcacaccagtgcactccagcctgggcgacagagcaagaacctgtctctaaaaaaaaatttttttaattaatttcaccgttacagtttgcatttcttttcttttcttttttttttttttttttgagatggagtctcgctgtgtcaccaaggctggagtgcagtggcgcaatcttggctcactgcaacctccgcctctcgtgttcaagagattctcttgcctcagccctctgagtaactgggactacaggcgtgcgccaccacgcctggctaatttttgtaattttagtagagacagggtttcaccatattggtcaggctggtcttgaactcctgacatcgtgatccgcccgcctcagcctcccaaagtggtgggattacaggcgtgagccaccgcgcctggcttacagtttgcttttcttttctttctttcttttttttttttgagacgttgtttcactcttgttgcccaagctggagtgcaatggcgcgatctcacctcactgcaacctctgcctcccgggttcaagtgattctcttgcctcagcctcccaagtagctgggattacaggcgcgcgccccccatgcccagctcgtttttcgtatttttagtagagatggggtttcaccatgttggtcaggctggtcttgaactcctgacctcaggtgatccgcccacctcggcctcccaaagtgctggaattacaggcatgagccactgcgcccagtccagtttgcttttctaatatggctactagaaaatctaatgtacctgtggctgcacagagttggtcttgagtggggaacacaggctctgggtgggtccatctccctggccccatggacttactgtcctttggggtgggaagcagcaggaagcaggccagagtgggcccccctctgaaacacccagttaccgtggaggagcagggcaggccaggagccccgaatgggtctgggcgaccctcaggggtgcaaaggagagttggctcaaggtagaggtggtctggggcctctcccagttcactttccaggtaaagacccctggccccgccaggcccccactgccctcagcgctgaccgacacctgtccagcccatttttgcgggaagtctagctcctcagccccaggactctccgccctcgtctgggctctgtatagcaaaaggccatgtgcctgtggtgaggactatggcttctgccttccccccacccctgagagggatggctcgctctctttccctgcttcaaagcccagaacaccctctcaggctccccactaaagctcctgcttccagctcaagaacagggcaggctcgctgacacagccaagacaagcacatcacgagcggctctggagctaaggaaggagcccagcctcctgctcaggtcaacagccccccgcccacctccctgcccctctgtgatggctcattattccggtattcccaggagacagatggaattttccccaccagcgcctaattacattccaactcgacgtggtacagtgacatgtgtccaagccgcgtacgattcccagtgtgactgagagctgaacactctgcaaaagggtccaaatggggatgtttcagtcttgaggtgtgtgttgagctgttacctggggaggccctggggcgaggccccctctcctgtcaggagcaagccccatctggaactaatagaactcagcctaaggctacagctgggcaggcagaagatgcttcagatggaaaccgatggagggagggggtgtaggaaaagcattccctgagggcctgtcccaagggagggagaggattctgacccggaatccaaggagcagcctaacttccctggacaggagtgcttcccagcgctcagtggagcgatctcagcgtgctcctagcctaggagagtccctgggctggggaagggcagtctctgtcttggggttccctgtctgtgtggcccgaagttccagggactgcccccacccactaacatagccaagggtctgatgttgggtgtggaggctcctagaggacacagagatcctctgccctctgcttctctccagaaccggttctgtcatcctgtgatgggaatggagccactactggttcctggtttaacattttacctagttccggcattgccaccaccaaagctcttctccactgagggcttcccagcttcaccccctccctcactgccttcaggggcccttccaaacctcgcccagtctctccctacctcacctccaggcctggcccctggccttcccagcatcctcacacatccctcccagaattatgggccctctgcctctggtcccattctctcactgctcctgaccccgaggtctcaattcaaatgatttcagaggccacgcaggaaacagaagaggctaaagtgggcagggaggtggtacaggtggcaacccaggagccaggcccctctgcaggccccaggctcccgccgctcctccccagaaggaagagggggccctgggttatcaattctttggattttgccagaggctgggaatcaggatttttgcatgcaattggttggcagcaaattcgacaaaacaaacaaaacaaacaaaacactgtgtgggccaacacagctccacctgcagcatggattccgccggaggccaaggcttctgacagctgccttcctggtctagatggccccctcagcatcctcagctccccgcccccgctacccaccacgcctcgccgtctgtctgtagactcagatcaagcctctccccttgaaccacaaaacccgcccaacccaaatctccctgcagccactgcctcactctcctgcccttcacaggcaaacttctccaaaggccgcctcctccctggcctctccctcttcgagccctacacctggaattctacccctcctcccagacagccatgcagactcctgctgttgcccaagcccaacactttccagtctctctctttctttttttttttaaaacagagtctcactgtcacccaggctggagtgcaatggcgccatctcagctcactgcaacctcctcctcccaggtttaagcgattctcctgcctcagcttcccaagtagccgggagtacaggcacctgccaccacgcatggataatttttgtaatttttagtagagacggggtttcaccatgttggccaggctggtctcgaactcctgacctcaggtgatccactcgcctcagcctcccaaagtgctgggattacaggcgtgagccatcgggcccggcctccagtctctgtcttgcctcaactgccctgaggtcaaagtccccttgaaatctccccctctcggtttccttgacacaacgcccacccgggaccactccaactttcctggacgttccttctcagcccctggcatgggcacctcttctcattttacccacagcccgtgggagccaccgtgacctgtgcatatactggtggctccagattcccctgatctcagcactctgccgactccaattccgaactgctttccgcacaggtcctctggaatctcctggaggctgccccctcagcattccccaaatgaaaagcaccccgtccaaaccctttccctcttcctgggccaccctctcagtgactaccaccgcctccatctgccagaaacccaggacgctgccttctcctctccccttgagtcgggttcaccaagtcccatagctcgggccggccgtcctctctcctgacagatcagctgcctcctcactcatctcctgcctttgcctggccccactcccccttctctatcggagtttttctaaaactcagctccgatggtgtcactcccaatttctgtgacccttcttgcaggaggatttctgactctgccctgggctcgaagccaacactcatctgcagtcaggagctcagcgcactcaggagctaatgttccctgcatgtgccatgttccctcccatccccgggcctggggtcacaccatcccctctccctgggatgcccctccttcctgcacatccccgggcctgaggtcacccgtcccctctccctgggatgcccctccttcccgcacctgcctggctcattgcacttgttctttgaacttggcacaggctaaggggattgtccccctttggggcttacccagaacactgttcattcgacctggcctcataattgtcagtttacatgtaggtatctatcgccgagtgacagactagaggcacaaatggacagtgccaggccacatataaaaatagaactctgacccatggtctgcagcaaccagcccaggaaaccaacccatgatctatagcaaccagcccaggaagccaatctgctgtctacaagtcagactcgtgggggagctggaccactgtcccttttttttttttttttttgagatggagtctcactctgtcacccaggctggagtgcagtggcgcaatctcagttcactgcaacctctgcctccgaggttaaaacgattctcctgcctcagcctcctgagtagctgggattacaggcacccaccaccacatccagctaatttttttatttttagtagagacaggatttcaccatgttggccaggctagtcttgaactcctgaccttgtgatccacccgcctcggcctcccaaagtgctgggattacaggcatgagccaccatgcccggcccggaccactgtctctagcaaacaatccgagaagccaaacaaggacctctgcaacagtctgcccagaacagctaggacttgattagtttccctcatttttgtccccacttctaacttcagaccaaccagagagaaagccaaatatgctcccctagccgatcacagtggatgagctgcttccccttagccagccgccagcttccctaagcgaacagcctccagtcagggcaggcttgaagctttcccattttcctctataaaacttgcccactcctctgcctgcctggactatctgccagaatttgagtgaggtggctggctcccttgctataaaagctctgaataagtagcctttaccggttctcatttggttggtcatttatttccacatgtgtaacaaaccactctgaacacgagggcttaaaacaaaaccatttcttactacaatagtcctgtccatgaaaaaaagttaatgatctcatgactctgtgggtcaaacaggctcagcaggatggttcttctgttgttctcactccaggtgtctcatgtggttgcagtcagatggtggcaggggctggagtcatttgggaactgagttatgatgtgtagacacctgagcctctctctctctccatgtggcctcaggatttctgctctctctctcttttttttttttttttttttgagatagagtttcactctgtcgtctaggctggagtgcaatggcgcaatctcaattcactgcaacctccgcctcccaggttcaagcgattctcctgcctcagcctcccaagtagctgggattacaggcacatgccaccacgcctggccaattttctgtatttagtagagatggggtttgaccgtgttggtcatgctggtctcgaactactgacctcaggtgatccacctgcgtcagcctcccaaagtgctggtattacaggcgtgagccactgtgcctggcgaggatttctcctcttaatgtggtctctgtgcacgatctctccagcaaggtagctggattttttacctggtggctctgagctcctaaaaccacagcgtgaaactgccagccttcttaaggcttaggacctgaactggcacagccttactttcactgcattctacccgttagatccagccgcagacccagcccaggttccacgtgggaaggggccctcgtgggacaggcgtggcaggagggatgggggccatctttggagactggccacgacccagcttccttccccgctgacactgtgttcttggtctctgtgccctcggcatctagcagggtgcctgtccgagtcagtgctcagcaacacctgataatcaagggactggagggaaggacggtgggtccgacagatggacagaagggctccacactggctcccctgcccccaggctcctaccaccctgtttagttcacataaacacggctctctgctgcctaacactcctctatttttaaacctctcaagcagtgagtggtgcttaacattttttgaatcagggaccccttaaggaatctcatgaaagctgtaggagaccctctccctagagaagcgagcctacacataatcactcacacttctgcagtatattaatgacggctgcccttgactaagatcttaccacgtgccagtgactgtgaaggcacattgtgtacattacccgacctcttaccccaaacatcctgcaaggtagatgctactcagtatggtttggctctgtgtccccacccagatctcatcccttattgtaatctccatgtgtcgaagggggaggtgattggatgatggaggcagtttctcccttgctgttctcgtgatagtgagggagttctcatgagatctgatggtttatacgtgtttgacagttcctccttcacatgctctctctcctgtcgccttgcgaagaaggatgtgtttgcttccccttccgccatgattgtaagtttcctgaggcctccccagtcacgcagaactgtaggtcaattaaacctctttcgtttataaatcacccagtctcgggtgtttctttacagcagtgtgaaaacggagtaatacgctactatttgttcagttttatagatgaggaagctgagcctcaaagaggtgaaggaataactagaaagaggtagaactgaggctctgagcaggaaggtctaactgcaaagccacgtacttggctgggcatggtggctcacacctgtaatcccagcacgtcgggaggctgaggtgggagggttgtgtgagctcaggccttggagaccagcctggacaacagaaggagaccctgtctctacaaaaaaaaaatttaggccaggcacggtggctcaagcctgtaatcccagcactttggggggcagaggcgggtggatcacgaggtcaggagatcgagaccatcctagctaacatggtgaaaccccgtctctactaaaaatacaaaacattagccaggtgtggtggcgggcgcctgtagtcccagctactcgggaggctgaggcaggagaatggcatgaacctgggaggcggagcttgcagtgagccgagattgcgccactgcactccagcctgggcgacagagccagactccctctcaaaaaaaaaaaaaaaaaattttaaacattagccaggtgtggtggcacacacccgtagtcccagctacttgggagggtgaggtgggaagatcacttgggcccaggaggtcaaggctgcagtgaactgtgatcacaccactgcactccagctgggcaacagagcaagatgctgtctcaaaaaataaagtaaaatcaaattagctgggcgtggtggcaggcacctgtagtcccagctacttgggaggctgaggcaggagagtggcttgaacccaggaggtgaaggctgcagtgagcagagatcgcgccactgcactccagcctggtgacagagcaatactcggtctcaaaaataaataaataaataaataaaaatttaaaaaaaaaagtaaaatcaaacccctctctaagtgctcctagagtcctacttcctgttctaaacacccggcctggcttcaaggccctgaataagccagagtgataactctgtgccccctcttagatttctggccgctctcaggccacccctcctgctcccttcagcctggccacccttgacccttcccgctttgcggcccctcccctgcaacgccctctctaccctctgtctccaccctaaggtcaagtctcccttctccctggagatttcctcgaccctagcctgccccagactcgtgcctgttttcccgcccacgtggagctctcatcatttcctgagtaaaagtgaacttcccgactcagccgcaagtgcctcgagagcagagacccatcgtccacgtccttctcactttccagacaggcactggcatcaacgctaactgttcacagactcctccacaggcccattttctatgcgattctgttgtttcctgaatcctcaaacccaaagactaaatgaacctccagaggggaccaggccagagagagcctggctggagctggacttctctcctctctgcagatgaagcagcggccgaaatgaaatgcagagtccgacccccacctgctgctccagcggggatatcaggtgtcatctgtttctttcttttgcattctcagtggataccatgttgcacgaaatctgtggctgcttttgtttcccaataacaacaaataaagactaggctgggcacggcggctcatgcctgtaatcccagcactttgggacgctgaggcaggcacatcactcgagatcaggagttcaagaccggcctggccaacatggcaaaaccccgtctctactaaaaatacaaaaaaattagccgggcgtagtggcaaacgcttataatcccagcttcttgggaggctgaggtgggagaatcactggaaacctgggaggtgaaggttgcagtgagctgagattgcaccactgcactccagcctgggcaatagtgtgagacactgtcttaaaaaaaaaaaaaaaaaaagtctgggtggggtggttcacacctgtaatcccagcactttgggaagctgaggcgggcaaatcacttgaggttacagtgagccgggatcgcgccattgcactccagcgtgggcaacagaacaagactccatgtcaaaaaaaaaaaaagcaatcccagcttcttgagttcctcaggattctgctcccctggtgtcctccacccaaactaggtcatgaacagaaagcagagactcccattggtccaaggacagacgtgactgaccagtcctgtccccatcatttctgtctctgaggcctggccccagccccgcatgttagcttgagggacaaggttacactttgcatataatgatacatttagttaaaaagagctggccgggtgtggtggctcatacctgtaatcccagcactttgggaggccgagacaggcggatcacctgaggtcaggagtttgaaaccagcctggccaacatagtgaaaccccgtctctactaaaagtacaaaaattagccgggtgtggtagtgtacacctgtaatcccagctaccggggaggctgaggcaggagaatagcttgaacccatgaagcggagattgcagtgagccgagattgcgccactgcactccagtctgggcgacagagcgagactccgtctcagaaaaaaaaaaaaaaaaaaaagctatccttaggaggggggaaaggttacatttagttctcactaccaccacacatggaaactgtttaataataaaactttccagcctgggcaacagggcgaaactccatctttacaaaaaaatacaacaaattagccagacacagtggcctgtgtctgtagtcccagctacttgtctgcagtcccagatgagatctgggtggggacacagaactactgtagacccagctgcagagatgagaggatggcttgagcccaggaggtggaggttgcagtgagctgagattgtgtcattgcactccagcctgggcgacagagcaagactctatctcaaaaacagaacaaaccctccattttacagatgagagagaaccaaagcttagagaggtaaatgacttgtccaggaccactgtgtcagctgagtgtcattatgtaatttgaggagagtttaataaagggatgattgacaaaggtgtgggtggggcctagggcatccacagggatagtaaataacaggcaagaacccactggtgttactacccagggtctgaaagggtaaagaaagggactggaaatgggaacccaaacagggaagccaggtggagacgggctctgaccagagcgagaactttggtcaggggcagtgccagcctgtgggggtggggaggggggagggaataaatacccagcggtcactctcctcctcactcccctctctcactctgctcacctgccactgtctcccatcggctgaacctgaaggccgagggcaggagcccactggtgtcatcagcataggccagcttcccaggcatggtgcctgatggaagggcaaatgggatgtcccagcacctttactagctgggaaggaacaagcctgcactgaaactcagcctcactcgctgctaaaggccaagcatttagcccttccactaccatctttccatggggtagaatccagaggcccaggggcccccactgccctgagtgttggcacctgcggcacccccacccatggtgatctaactcctaccttgctctcagcacacggctctgatcccaaaatgtactttctagttttgagagaagacatggtacagggagccgaggaaatccccagcagagaggagctgttctacgattaacctaaagcctcttattagcatctttacctaaaatgtcccaaacacccacccagaaatgagtctcctccaccctgactggcttcttccttggggtagtaaaagggtttcaatgaagatgtgagctgagactctgcagttcagagcatcagcagaaaactttggggggaccagacgtggtggctcatgcctgtaatcccagcattttgagagaccgaggtgggtggatcacttgaggtcaggagttggagaccagcctggccaacatggtgaaagtctgtctctactaaaaatacaaaaattagccaggtgtggtggcgcggacctgtaatcccagctactcgggaggctgaggcaggagaatcgcttgaacccgggaggtggaggttgcagtgagctgagattgcgccactgcactccagcctgggcaacagagtgagactttgactcaaaaaagaaaaagaaaggaaaagaaaaatagaaagctttggtggaagggagattaagctgcaccgtgtgacaggaggctcaaagcaagctaaggccacatcatctcactgaaccctgcaccatttgcagatttactgaatcgagagccaattctgacacagtttctttcaagacgatctacctcacgggtgtgcgaaatttatttgagataaagaaaaccactacagagagagcacaatcttcaaagcccacccctgagaccagaaataaataaaaacagtagcccgtacaaatacttgggagccgtgagaaacgccatccctgcagagagcaggtctttaaggcaattttcttgaactctattcagcactcactcaaaatgccttttaaaaataacatatgattttcctccctctccaaatgcacccttgttctttctctttcaggtaagaatgagccagctctggagtgagaaaggcagtcactcatgttgataggcaatgatggactatgttcccaggagggcaaatcccaaagccaaacaatagcccagggctacaggagtcttgctgagccacgagaaggcccaggggcagggggctggccccaggggtcttcactcaaccctagaaggtcaaggttccagagaccaggctcctctctgaagaggtgtcggcccatggcctggtctgggttcaaataatgaacactttccccagatggagatttgattccctgtgagaagtctcagtttcactgtaaggtttgctaagaatgaaaggatcttctctctgcatgaggttgagggagttacaaagaggtttaagtagtgttggtgctgcagaaggaaacgggacccacatcctggccctgccactcagcagcagtgtgactttgggcaggtggattggcctccttgagcctcagtttctgagctacagtggggtacttcccagggctgttgggaggccgtgcagtttatctgagtacctagttacagtccctgaatctaggcaaaaaccactgcagttggggctcaaaccattgccccactcctggaaagagaccaccacccagctcacggggcagggagccaggggtgacactgtccagagacagcacaggccatggttaaaactaaagcccggtctttgggtggaactcggctgggactcaacttgtcatttagtggctatttgctcttggccaaagcccttagcttctctgaacctcagcgtctgtatctgtgaaatgggaacattgataacatgagatcaaatgagccagtccaggtacagtgcttagctagtgcctggctcggagtaagtgcttattttgttaccattgtggcctctcagatcagactccctgtgctaccatttaatcacattttgtttctttgtatttatttttacagttagtttctgtttatggcaggtgatagatactctgcctctccacttaaagatgccgtatccagtttccttttaaaatacatttatctaagtgaaaatgggtcaatctacggaagaaaacagaagtgcaaaaatagtgcaggtgtgcacagacgggcgagacgctgggaaggtgcgaggcagagactagagtctggggaacacccaggcaatagaaaggcagagtcaggcccgagagcgccccgcacccaccccacggccaccccaaggtcgttccaccccaaggtcagtccaaggccagcaacggcggtggtgaccctgacgaccttggagcctgcccttccccaccttcggggttctccctggatccaccacctcgtctcaggcggaggtccccatccccctgaggatgactttccccaaacaagagcggggtcgagagccgcccagtgccgccccccaccccgcccgccggcctggggtgtctgggacccaggaaccacccgcggctgggagacctggggcggcctggccagagaccgcggggcctggggctgggggaggggagcggtaagtgggggcgggaggaggtccctttgcagagggaaaccaatgtcatccgtctccaacttctgaggagagacccggagcagccagcagattaaaaaccccatcccggccctcaccgaggtgttacaactctgtcccagttgcctggcaaccgcgcaggtgtgtgatagggcgagcggcgctcccgggagccaaccagcggccgcgggccgcccgggtgggagccggggtcgggggcgcatcctgcatcctgcaccccgcatcccgcacctgcatcggagccccgcgtcccgcaccccgcaccctgcaccctggatcctgcatcctgcaccccgcacccctcatcccgcatcttgcaccccggatcccgcaccccgcatcctgcaccccgcatctctcactccgcatccggcaccccgcagctgcacgcaccgcaaccctcccgcggccccgcctcctgcactctcggggagggaggaaccgccattgcctgtgggggtcaaggttggggcggctgccaggccctgctgggctgcatttaaccccagggtgctcctgccgcctctgctgtctccaggcgtcgcatcaccggccttgaaatcagtggccaagagccccgacccgtgcaagcggcctccagggtccccaccccactgggatccaaacccagcacttcaggggaacccaagaatggggacgggaggcacctccctctccaggacctgggctctgctttgggccacacatacaccttctcctgtccccagaggacgggctcgtggagcagaagcctttagaggagaggcttggccgaccgtccgcaacagccatccaggcggaagcgcccaggtgggctctgcagccggcctcccagcaacagcagccaagaatagtggccaacagctcttgcttggaattaggctgcgtttggatcccagccggtgactgtgtgacctttagccagtcttgcaacctctcagtttgctcatccggaaaatggggggggtggagggtgggctgctgtgcggattcagtgaggtagtgcgcacggagcatggagcgtggtgcttagcaaatagccctccattcagctcagagaaagaaatggttcctttgggaactggaagctgttgccattaggcacaagtcccagagttgctgcagagaatcccaacacagtgctccaagctccccaccacaccccacttccagtaacctgtgcagggaacctctcagaggtagggcccagagaagggtggagggccacctggcttccccacgtggtggctatgcccagatagcagaaggtgtggccccctcatctgctgcctcttagcaccatttccatcaatcctaaagaaacactgaggccaacgcctgtaatcccagcactttgggacgcctaggcgagtgcatcacttggggtcaggagttcaagaccagcctggccaacacggtgaaacaccatctctactaaaaatgcaaaaattagctgagcgtggtggcacgcacctgtaatcccagttattcaggaggctgaggcaggagaattgcttgaacctggaaagcaaaggttgcagtgagccaagatagcgccactgcactccagcctgggcgacagagccagactttgcttcaaaaaaaccaaaataaaaaacaaaaaaccccatctctacaaaaaaatacaaaaaattacccaggcatggtggcacacgcctgtggtcccagctactcaggaggctgaggtgggaggattgtttgagttcaggaggtcaaggctgcaatgagctatgcgtgcgccactgcactccagcctgggtgacacagcaagaccctgtctaaaaaaaagaaaaaaaaagacaaagaaggaaagaaaagaaatgctgagtgggggggtgtgggttgggagtaccactcaaggctttgcctaactgcccaactgactcaccctgtcttggccctagctttcctctgtccctctaagtagcattccccatgggagtcttcaccagcctatactaagatctctgccttcctgaagcaatcactgcgcacctgctattcagcagggccagagacagaccaggacagaaaaggggaaaaaacaggccagccaagtccagccctttgcccagtagggtggcccttctctttggagagcacctccccaccccttccctcctcctccccccttgactgccgcttaccgctaggcaggccaagcgtgaaagtgctcagacccggaattgcgtggagaaggaaatctctgttcttcaggcaaaccccatccagccttttgggattctcctgagaagccatgctgagccccaggagctgaaggcccaggccctttcccacacaccctggcctgggggtgtcttaaaatcccagcactcctaatccacttggctcagatatattttttcttttcttttcttttttgtttgagacagggcctcactccgtcgcccagcctggagtgcagtgccacaatcacggctcaccaaagccttgacctcccaggctcaggtgatcctcccacctcagcctcccaagtagctgggactacaagctcgtgccaccacgctcagctaattttttttttttttttttttagtagagacaggacctcactatgttgcccagcctggtttggaactcctgggctcaagtgatctgcctgcctcggcctcccaaaccgctaagattacaggcatcagcccccatgcctggcctgatatgttttcttaaaaagacaaattccaattccataggatcccaggcagcttttgacactaatgtttccatggggctttttaaaagcttcggctattcggtggagagcaaacatgttcacatgctaacagtggtgcttggctctgccctgggtatttgcctccctcccacttctttatagcgttctgtacttttcatactttccacagatgacatatattacttttatagtaaaaataaataaacaaacacaagagattaattcatgggcccgctcagcaacctatttaaatccttatcaaagtggagcatttgggaggctgaggcgggcggatcacctgaggtcaggagttcaagaccagcctggccaacatggagaaaccccgtctctactaaaaatacacaaaaacagccgagtgtggtggtgtagcctgtaatcccagctactcaggaggctgaggcaggagaatcacttgaacccaggaggtggcagtgcggtgtgcggagatcacaccactgcacttcagtctgggccacagagtgagattctatctcaaaaaaaaaaaaaaaaaaaagaagtggagcagagtttcccagggggccaaaactggcccctgtccctggctgcttcctggagccacactcatcaggcaggaggcactgatggggtaaagtgctccacaggagccccttgtgacccacagggagtcacagtgcaagaggccagcagtttcctgggagcctcgtgcctaggacattggcagcactttgggaggctgaggagggaggatcacttgagcccagttcaagaccagcctggacaacataaggagactccgtccctacaaaaaaatttaaaattatctgggtatagtagtgcacacctgtagtctcagctacctgggaggctgaggagggaggatcacttgagctctgggggtcaaggctgcagtgagccgtgatcgtgctactgcaactccaacctgggtgacagagtgataccttgtctccaaaaacaacaacaacaaaaacctagaaatgaagctgactccatcttggtatttttttctttgcataactctgctttccagagactttagggaaaggggactgctgggccttccctcccttttgccctgcggctgcctcgtgtgcagattggctgtgctgaggtcttccctccctcatgccctgtggctgcctcgtgtgcagataggctgacctggtccaccctgagcagcctcacacgagtcactgcctccttccagctgagcctgctccagcctgagctgtggctgacgtgctggtacacactgccctgggagctgtgtgcctcagcctggactgctgttctcccaggaagctctagaacccacagtgcagtgtctgggacacagcttgtacccaacaagcacagtcatgcatcacttaatgacagggtgtgttctgagaaatgtatcatcagaccatttcactgtgcaaacatcatagagtatacttacagaaatctagatgctagagcctaccgcacacctaggctatatgggatagcccactgctcctaggctacaaacctgcacagcacgtgcctgtgctgaacacggcaggcaactgtaacacaagagtgagtatttatgtattgaaactggccggcacggtggctcacgcctgtaatcccagcactttgggaggccgaggcgggtggatcacctgaggtcaggagttccagaccagcatggccagcatggtgaaaacccatctctgctaaaaactacaaaaattagctgggcgtggtggagagtgcctgtaatcccagctattcaggaggatgaggcaggagaatcgcttaaacccaggaggcggaggttgcagtgagctgagatcacgccactccactccagcctggtgaacagaataggactttgtctcaaaaagaaaagagaagagaagagaagaggaagccgggcgaggtgcctcgcgcctgtaatcccagcactttgggagaccgaggcgggcggaccacgaggtcaggagttcgagaccatcctggctaacacggtgaaacctcatctctactataaatacaaaaaaaaattagccaggcatggtggcgggcgcctgtagtcccagctactcggggggccaaggcaggagaatggcatgaaccagggagcggaggttgcagtgagccgagatcgcgccactgcactccagcctgggggtcagagcgagactccgtctcaaaagaaaagaaaagaaaagaaaagaaaagaaaagaaactctgggaaggggcagttccacaaacaccgggccctcgacgccgtgcaggaagccctcccctcctgcatggaggtggaccgccaggctccccgacagctccaggttgctgggtaaccctgaaaatggagtgaggaaagttcgacaacttgctgacccagaggaaggaggaatggggtggctgagcaggaggtaaagcgaacctcagggaggggcagcggctgacagtcactgtgtgccacaggctgggctccctttgctgtgagctccttgaagggctgggttttccccagttctctctcaggcaccccgcagggcagcaacccgcaaactgggcaagtgcctctggggggccatttggtggtggagctatgctgagacctcacattcttcttcttcttcttttttttttttttcctgagacagagtctcgccctgtcacccaggctggagtgcaatggcgccatctcggctcactgcaacctccacctcccaggttcaagcgattacagtagctgggattacagctgggattacaggcacccgccaccacacccggctaatttttgtgtttttagtagagacagggtttcaccatgttgtacagtctgatcttgaacccctggcctcaagtgatccacctgcctcagcctcccaaagggctgggatgacaggcgtgagccgccacacctggccgagacctcacattcttctgaggatacttgtccagtaatgacaccagcgggggccaattgacagtgatactaacaaaacatccgcaagcccttcccaagacgctgcacctaattcgggaacgaggttcactgcagccttcgcctcctaggctcaagcgatcctcccacctcagccacccgagcagctgagaccatagtcacacagcaccacgcctggctaacagcttctattttttctgtagagacggggtcttaccaggtgtgtccaggatggtctcaaactcctgagctcaagcgatcctcccacctcagttacccaagcagctaagaccataggcaggcaccaccatgcctggctaacattttctattttttttgtagagacggggtcttacccagtgtgtccaggatggtctcgaactcctgggctcaagcaatcctcccacctcagcctcccaaagtgctgggattacaggtgtgagccacggcgccgggtcctgaacctaactccgtactcatgactcgttttcataacggggtccacaaaacctttaggctccacccaatccggatcggaaccctgctccctcccggctgggacatgtaagctggtttcccctggtagaaccaggctggaataagggctggccggagccctgaggccgaggaaacccccagatcatgtctcaaggccagctgtatacaccaaatgcaggtgggcagggcgggcagcaccttcccttcccccatttagtcacaatatcacagagtccaaagaaattcttgatcattttgaacgggggctcctttcgagaagccgataaagcccatggatattctcccccctaaaatgcacctacacctattgttctaggggcctgtggatgcctgaggcccaccaggtgccctgtaggagcctgagaagccgagtcaaggccgctgctctgctctggaagcagcttggcgtgaaggtgacacaggtgacagtgaggaggctgagttctatcccagccgctgctgcttcttttcattctttccagacagggtctcgctctgtcaaacaggctggagtgcagtggcccagtcatagctcactgaagcctcaaactcctggactcaagcgaccctccctccttagcctcccaaagtgctgggattccagccaggagcccatggtgcctggccccatcccagcttctaagtcacttccccaaaactctactgagctttgtatgagatgttctcaaacttcctcccaacttgagaattctgatcctttctgcgactttcatcttctgcaggaatgagccctgccccgaggccttcaagaaaaacaggagagccgggcgccgtggctcacgcctgtaatcccagcacttcgggagaccgaggccagtggatcatctgaggtcaggagctcgaagccagcctggccaacatggtgaaaccccgtctctactaaaaatacaaaaattagccgggcgtggtagcacacacctgtaatcccagctactcaggaggctgaggcaggtgaatcgcttgaacccagaaggcggaggttgcagtgagccgagatcctgccactgcattccagcctgggcaacaagagcgaaactccatctcaaaaaaaaaaagaaaaaagaaaaataggagaaatggaactcacttaggctgaacaccccgttatatgcgacaagcatttttcacgcactgctcatttcattctctcaatgaccctttcaggcaaatatactttgttcctttttaactgatcatgaaactctcctgtcaggtgaaggaacttccaggaaggtgtttggcaagtggtggggattggatttgaacctgggcctgctggactccacaagcctgtgctcctggcacaaaggtgttcactccctgagtgcctgcaccaatgccctaggtcccctccttcttctcacctcctctgtcaactctgcccggaaatgtgggccttccctctacctttggaacctcttgggatcaagccacctgcctcctactctctgtccccagggctcgcaagccgcctggcagatgggaaacgaagatcccattcccatccatctgcatcaaatcctactgagtccaccccctcctgggtccactgcttcactgggggacaattaatagctatggttgattactggacacttatgcacggaggaacataaaccgggtttacattcccggctttaaaagcccagattaatcgccctgggctggttctgtcacacatagggatatattttcttcttggaatttacaagtagttccatctgagaaataaacaaccagagataaaaattacattgtcacagtacaggtgtgacagatgtaggaagccagccgtctggtggctgaggaggtgctctgccaatggaatccaccaaatgagccctggaggagccccaggtaagggggataggatgctgatgggatctcagccacaggggaagtgtggaatctctgcaatttgcatttcatcactgtaaatcacagggttcccaggccggcctccagagccagggtgagaggttgattggcaggagacctcctcaagctgccccgcctctcagctgcaggcctcaggaaccccagccttcagggacagtaggatggccccagctaagcaacaagcaggaagacacttgcctataaccttgacagctctgtctccaccaagacacgaaccacctctcttgtctctactgctactagcagagaggactaggcccgttggtggaagagagccatctccagaaggtcacaggaaaaccaggcgggatctggggtccacagagtcataataacaattagcatctcttgagtgcttaccaagtgctcggcaccctgtgaaggactcggtgaggattattgtgtattaatcctcatgaccacccgatgaagtaggtattattattaacctcactttacagatgacaaaactgaggtgcacagaggttaagtgacttgcccaaggtccctggagtgaattgaatggtggccccccaaaaggatatgtccacatccatatccctggagcctgtgaccttatttggaaaaaggcgtctttgtcgatgtaattaagttaaagatcttgagataagatcatcctggattaccccaaagggccataaatgcaatgacaaatttccttataagagacagaagaggaggagacagagggaagccacgtgaagtcggaggcagagactggagcgatgcagccacagagaacccccacggcccccagaagctggaagagccttcgtggggtgcacagtcctgccaacaccttgatttcagatttctggcctccagaactgtgagagaataaatttctctggttttaaactaacgagtttgttgtaatagccattaaaaaaaaaaaattcatagccaggagtcacagagccaggagtcaggtccggcaggctgaccccagactcaggccctgccccccgacccaggcccaggctctgcccaccacatgacacaatgctcacaggcttccaggcctgggttccaggcttggctctgctgcaactgagccgtgcgaccttgaggacatctctaagccgcagcttccttatctgcaaaatgagggggctggacaagataagtgggtgccttcggggctgccgctgcgacaaggggaccaagtggggttctgagtaacgcaggcaggtgcgaaggagaaagaaaaaaggttcagcaaaccacctgtaggcagccatttattacagggagtttgggccacccatgatatgttcccctccttttagccacagaaccctgcttttcctttgggagagccggtcccctcccccagctctccacccatgcgccatgatagagccagctcagcccccaccttccggagtgggctcgtacccaatcaacacctgctcccaggcctccatgactggttcagggttgaatttgagccaatgttatcaggcccacaactttcgttcaagcctgtgggggaagagaagttctccttttccgggaggagggacagatggaaacctggagctgctggatccttctgagaatgacgccaactccgtgaagccatgccaagaagccaagaaggagaaaccacgtccggagacaccatgggctcaagatgcacctgaggacgaggctgtctgtttcatgagcctgtaagattcccgctctgtcccagtggttttgtttccgtcttttgtaaccagagtctcacccttcaggtccccaggtctggccatttccaagggtccttctagctctgaagcagtgtgatttcacagccaacaaaatcacagcacctgtttgcctgcactgcagatgtgtgtgagttcagggacacacacacacacacacacacacacacacacacacacacacacacacacggactttccacacattatcccacaatatctctgaccagaaataattaagccctcatgctgggtgcggtagctcacgcctgtaatcccagcactttgggaggccaaggcaggtggatcacctgaggtcaggatttcaagaccatcatggccaacatggtgaaacaccatctctattaaaaatacaaaaattagccgggtgtggtggcacacacctgtaatcccagctactcgggaggctgaggcaggagaatcacttgaacccaggaagtggaggttgcagtgagctgagatcacaccattgcactccagcctaggaaacaagagcgaaactccatctcagaaaaaaaggaaaaaaaggaaaagaaggaggccgggcatggtggctcacgcctgtaatcccagcactttgggaggctgaggtgggcagatcacgaggtcaagagatcgagaccatcctggccaatggtgaaaacccgtctctactaaaaatacaaaaattagctgggtgtgcctatagtcccagctactcaggaggctgaggcaggagaattgcttgaacctgggaggtggagactgcagtgagccaagatggcgtcactgcattccagcctggtgacagagcaagactccgcctcaaaaaaaaaaaaaaaaaagaaaagaaaagaaggagccacgaatatgttcagtattttgtatttactgtactccagcctgggggacagagagagactctgtctcaaaaaaaaaaaaaaaagaaaagaaaagaaaaagaaagaattaagtcctcaatgatggaacatccctcccctctccagaggtgtctctctccaccgcatccctagcacccaggagtgtgcctgaaccccctgatgtcttaaatgcttcctgaaggaatggagaaatgaataaatggatgctggatgctgtaggcacttataactgggggacctgacctcgtctggaaggctcaggaccacttcccaaggaagcatcctttgagctgggctctagaagaagggtaggaattgtccaggtaagcaggctgaggcaggggcaacattacaggcagcacagcccaggtacatgtgaggaacagaaagaaaatagtcagcatgagcggacactggtgtgagatgaggctggaggagaggcaggggccagatctcatgaggtcagttaaaaagccctgttaaaaacaggggcccctatttcaagagccgtgggaagccactaaaggattgtaagcaatcaaagtgatatgatcacatcgtgttccctaacatcccctaattgcggcaaggaggctggagaccagagagtaatctagaccaccaatcaggaggctactgcagtagtccaagcaagagatgtaggaccctggtttaagacggttagcggcggcgggggaaacggagaggaggggatggaggtaaaggatgtgcaggagatggactcaactgatggaagatgacgagggagaggatgactcagtgggtgctcagcacacagcaagccagatcctgcaccgccctagatttggacacttctattaatgtggccaaaaattatagaggcttttttttttttggaaggcacatcaaactttctgactcactgtgcttgcaggcaaataaatgcttcctcatcataacccttaatgggacgagaaggctctactgcgagcacgctggaggggccctggagccagggccagctgctggatcacaggcttgagaagggtgctggagcatcacactggctgagaacagaaagccggggagtgggggtgtcatatgttttttatttatttatttttattttttgagacaaagtgttgctctgtcgcccaggctggagtgtaatggcatgatctcggttcactgccacctccacctcccggtttcaagcaattcttctgcctcagcctcccgagtagccaggattacaggtgcatgccaccatgcttagttaatttttgtatttttagtagagagggggtttcaccattttggacaggctggtctcgaactcctgacctcatgatccaccagcctcagcttcccaaagttctgggattacaggtgtgagccactgtgcctggcctgagtgtcatttcaagaaggagaaagtatgcttaagcctaggagttcgagaccagcccgggcaagacagcaagaccctgtctctacaaaaaaaaacaaaacaaaaaacaaaggtcacgatagtttgtacaacaatgtgagtgtgcttaatgccacagaactgtacacttaaaatgattacaatggtaaattttgttgtgtacattaaaaaacttttttttaattatcaaggatgcatagaatatttgggaagctgaggctggaggatcacctgaggccaagaggttgagaccagcctgatcaacacggtgaaaccccatctctgctaaaaataaaaaattagccgggcatggtggtgggcacctgtaatcccagctacttgcgaggctgagaggctgaggcaggagaatcgcttgaatctgggaggtggaggttgcagtgagccgagatcgagccactgcactcagcctgggtgacaaagcaagactccatctcaaaaataaacaaataaaataaaataatgaaaaataaaaagttcttgtaggccgggcatggtggctcacatctgtagtcccagaaccttgggaggctaaggcaaggcaggaggatggcttgagctcaggagttcaagaccagcctgggcaacagaggaagacctcatctctacaaaacataaaaaatattagccagatgtgtggcatgcacttttggtcccagctactcgggaggctgaggtgggaggatcgcttgagcccaggaggttgaggctgcagtgagccatgatgacaccactgcactccagcctgggcaatagagcaagaccctgtttcaaaaaacaaaacttactgtaatacaatcaaggctaacagaagaaaggaaggaagggattatcatggaactttttgagtccactacagatgcgcttctgagtcagaatcttttacaaagctgggttttccgtctatcacactgttgtttcgctctacctcttaaagtctctctgagctgtgtctccaagagaggagacggtgtgcacacagccctgcacccaccctttcctgcatgtgtagtgctccccctgcatagccacaatggagaaaatgagagcatccagggaacgagtccctctctaggcgcagagagcaccaacccatgtgcaatttggatgcctgaccttggccaattagtaccttgctcagtgtaaccaaccgagtcgcagattccattcgattcagcaaacatttatcgagcatctcagtgccagctgatttctgtctgttctataagtgcaatggagctcagccttctctccagattagagttatttgtatttcaaggcaaaaagataggttttaagtacctgtaagaggcggtaatggatgccccggggaagggtaggcataggcttgtagggagggagaggagctgagaaaaggcctgagaatcagggtggtaggaccgggctggaaacggaagaaaaggtggactgagaagccagataaagcctgtgagtttgtttttttttgaacctcccccaactttctttttaatcgaaaagataatacatgcacatagtaaaaaaaaaaaaaaaaacaaaaaaaaacttcaaagaacacaaaagggtatacaataaaaagtaagtctcctttcctctcccagacctccaggccccagtttctttcttcagaggtatcctactgttaacagtttcttttgtgtatttccagaaaatttctatcacatacaagcatgtctttttagaacccaaatggtagcgccatgtattaccactgctttttcactttgcaaggtagcttggcatccaccccatctcagtgcacacagagtcacccattcctcgcagcggaaaatcccatcgcacgggggtgttgtcatctacccagtggatcccctcctgatggacaagtaggttgtttccagtttctgaacttgcatgctcccacatgcgcatttctgcccacagatacaagggtagcagtagatcaattcctggaagtggaattgctctatttacggagctgtaactgactctgactgagaagtccagggagagctatgtctccagaagaggagagacgtgtactgagccccacgcccaccctccttccttgtacacacagtcccccagatccttcatgacatgggccacgtaggagcaagggttggactgcatgcagaaaaagagtcctcgtgccgggcgcagtggctcacgcctgtaatcccagcactttgggaggccgcggcgggtggatgacgaggtcaggagaacgagaccatcctggctaacacggtgaaaccccatctctactaaaaatacaaaaaattagccgggcgtggtggcgggcgcctgcagtcccagctacttgggggggcaggagaatggcgtgaacccgggaggcagaggttgcagtgagccaagatcgcgccactgcactccagcctgggtgacagagcgagactctgtctcaaaaaaaaaaaaaaaaaaagaaaaacgaaaaaagaaaaagagtccttctctgggttcagagagaaccaacttgtgtggctggggactcagttggggacaaagagccgccccctcccccagttggggctaagagcatgtagagggattgaagcttaaggatacagtgcctggcacgcagtgactgctccatcagcatgacctattgtgggtattattattatcgctgttgtgatccagagggagcctgtctcgcgggtggctgggaaagctccctgtgctgttctgtccaagagtccagttgattcaaaggcactgaagtgggagcctgctcagctcttggagctggatgagagctgagacaggcagttcccacttagcacagcttggcatcttcaactcccgggcctttgccagtacctaataaacaccatactccatgccttgccatcgtcgcccacgtgtgtcctacgcctgctgacgatggctgccacagcacacagtcagcatttcaccctgacacatgactctcttatgacctgctttctctttgaatggatgcggcctgaatgatgtcactgtgacacaatgaaactacaggtgagggccgggcgcggtggctcccacctgtcctcccagcactttgggaggccgaggcaggtggatcgcctgaggtcagcagttcgagaccagcctggacaacatagtgaaaccccatctctactaaaaaagaatacaaaaaattagccgggcatggtggtgagcacctgtgatcccagctattcgggaggctgaggcaggagaatcgcttgaacctgggaggcggaggttgcagagagctgagatcgcgccaccgcactccagcctgggtgacagagcgaaactctgtctcaaaaaaagaaaagaaaagaaaagaaactacaggtgtgtattactgggtggggaatgtcagaactgacacacccaaaaaagaattagaagaattagccttgactctggggccagtcagacctgggttcaaatcctggccctgacacttctaagcatgtgtcctggggaagtcatttaacttccttgagccttagtttcatcacctgtgaaatgggctaagcacttgttctaacaggattactgtgaggagtaagcaaaataatggattatttatgagttttttgttttgttttgtttttacagacctgctttattcttaaacttatttcggcagttgagataatatatgtaaagtgtctggcacatagtaacggttcaataaagcatccgttcccttcccctacccttccatcagagtggtcatctttgaacccaagtcccccattgcaaagcactgccattacttgaaacaattctggaacttcctcgtgagaaaactggctcagttggttagggtgccatcgcgttttgaatctcaaaaaaaaaaaaaattccgataacaaaaacaaatcacattctgcaaattgctcagcccctgtattcacaacacacagcttcaaattacttttggccttttccaaaaaatcaaacccaccctcaaaggtcaaggattcaccactgccaaggctattaagaggaaaatgctgtgaaatctgaagcaatttcccaagaagaactcatcaagttttaagcaagcacagcagaactggtagaaaaacaaagccccccagtccccacccccggctacgctgaaccaccccgttcctcaggacacgtgcactcgaacctcgccgctccgggtcccaatctgtggattgctttccccagtctctggagtaagatctcattttgctgcctctgagaagagtgtgcccaggtggaattcacaggcgctgggagcttgagggggaagtgatgggcaagagctggggaggacaaagcggctttcactccatcccttatggggatagtgaggagggagtccagggacagggggccagcaactagatgccttgggggcacagccatgtctcccctgtgctgagcccaccgtgttacagaggacctaccagctctcccagccagggacacacttggtccctcctcgggcaaaagcagggcgagtactgcccaagtcctgaatatcctcggcctcatcccctgatattctcaattctcaggtcagaaaatgccaaggggcctgctccatccccttcccaccagcttgcgagcttatcaaacccacaatttgggagaaggtcctgccactacctaacttcacagaaggcagaggacaatgagtctgagtgaagatgctggagtcagccaggcctggattccaatcccagctccgccactgacaggcccggtgacctcggtcaacacaagcaggctctgctgcctcccacctccaagcctcagtttccttctctaggaaaggggataatacacgcttgcgttgggggaaaggtggttaaaaaggaggcttataaagattaaatgacggccaggtgcagtggctcatacctgcatataatcccagtactttgggaagccgaggtgggaggactgcttgaagccaggagttcaagaccaacctggccaacatagtaagaccccatctctaaaaaaaaaaaaaaatcatgaaatgagatgacagaggctgtcaacagatggccagaaatactcccaaggccctgtgtctggagcatgtggttcccctgtgcttacaggggccctgggaccatgctcagagcccacagtgatggaatgagcctctcaggccccagcagcccactgagctctcactgcaaaaggtaggcatggggccgagtgcaggggctcacacctgtaatcccagcactttgggaggccaagggaggccaaggcgggtggatcacctgaggacaggagtttgagaccggcctggccaacatggtgaaacaccgtctctactaaaaatacaaaaattagccgggcatggtggtaggtgcctgtaaccccagctactcgggaagctgaggcaggaaaatcacttaaactcgggaggcggaggttgcagtgagccgagattgcgccattgcactacagcctgggtgacaagagtgaaactctgtctcaaaaaaaaaaaaaaaaaaaagataggcatggcaggggaacctctacagccaggagggcctaagcttggctctggaaagacctttgtcctttgctcactctcctcgtccttacaggctcataccccagatgagggagctgactctcactgtcgccggaagtcccacctgccagaaggcgtagaacaacatggttctgcctggcactgcgtgctgaagaaatacccctggatcattatcatccccctcagatggctcgctgcaagatctaccatcaaaggtaaacaagtccttatcttcttgctaattggttcgaatcgattgactttataagtgggtctaatgtgcaactggtgagagatggcctatgtgccgagcaacccatgcacttaactagctgtcgctcaagcacggaacaaggcatattaacccaaatttctcagaccgccttctcctgagaggctgcagagccagcgtctcccctgttgggctcatatttgctgggtcaacaggcccgcttagaggcacctggatgctgttaggcgggtggcgataacactggtgtaggttccttggcgaggtgagggcgtgctgagcctgtgacaagcatccctgggccctgccctgccctggctcaggctgcctggcaggagaagggactgaatcccaagtgttggcaggggaggagcaggaaggcaattttcccggtactctcatcatctgccttccatgtgccttttgatgtgtttccttactcggctttctcccaggaaagcttgaatctgtctcattgaacccatctctgaggccaggtcactgctgctttccaggtgagagctgatgttcagtcttttatcactgccagtgtctgaaatagtccagaaactggtaaagacaacagacaccaggagatgacctaaaaatcttgggcagagtacgggtgaacagcagctctccccacctcccctcccccccggcccaaggtccccctgcagagggctggctgctgccctccccctgagaagcggccagctacccccaacttttttctgctctattaataaacctcagctgagatccttgtgacccccctcttccggatgtgatcctcgctgccttgccttatcagccttgcttttcacaagctcttaaattcatgagaaaagggaaaaagtgaaatcagatagaaatgcaggtctgtttgctgttttctccaatgaaatggttctgggtaaacagcagacgcctttgatgaaatcccagcaggcttaaacaataaagctggttacaaactcaatctggcggagatatcagatctgaaattgtttcaaaaaacatgtcaacattttctaatgctcctaaaaaaaaccttcctgggctgcccactgtggagtctgggtctcggagacaggacgggggccaccccagcctctgcccaggccagctgggactctgtgcacaaagaacccaggagcaggctattcctggttgctgggggccctgccagctgcagatgtgtaaatggccacttcagtcataacccaagccaggcaggggaccagccacccttgtgtacaccactgcaccatcccccgcaaccaacctggcctccccgccttcccccttaactatcttccattctccacactgcagccagcagaggcttttaaaaatgtaaatcagatcatgtcattcctttgcttaaaacctctaatgcattcacactgcacttagaacaaaatccaaactcctccgtggcccacgagaccttcagggatctgccgctcactacctgcttcttcactcacgacaatcaacctcactggccttcctcgcaaattatttcctgcctctgggcctttgcacttcctacagactttgtctgggatgctttttccccaacccatcgtcctcagccagctccaggaccagcccagctgatgtggctcctctcccggccaagtacaatatcacattaacagttttattctctacactgagtccaaccacgatctgaaatcatcgcatgtgtttacttattaactgtcgctctctggaatgcgatccctctgcaggtctgaacttgtctgtctggtagtcgacaagtatgactggcccatagtaggtgctcaatcataaaccactgcatgaatgagcagtgaggatgtcaccgtcccctctaggtattccccaggcaatgcccaggaaatcgggagcaccaccagcacactaaggtatcctactccaaggtacaggaacacctcgccagcctccctctagggcacccctagctgcccctgccccacccaggcctcatccaagcccctgctggctttaaaccactaggactcggaggtcaggcctgagccggggctgggaggtccccgcccccttcacagccctcctactcgggcctgcatccccgcagacccccgaccccagctgacgccctctgagaagggaggtgacaagggcaggccggcaggggccggcgcgctcctcgcaggccttctggggaaagcgtgggcgcaggtgccttcggttgggctcctgggtctggggcctgggggcgggcagcgatgtccccctcagggtgccgggcgccccacccccacccccgcctccgccccaggccgcgatcgatcccggcctctcccggcctcattaccgagggagagctgccggggctggcaggggagccagacggcggcggagggggcggggaggcctccttggctccctggcccggattaaatatttactatgttttgtttggcctttgggggaggggcggggagggctgtcgcattgatccggagctgcagggcgagggcggtgcccagacccggcgccccaaggcctcccgcaggccgacccgagccgagcgcgccctttgggcaccggccccgcccgggagggtcttctcgctctagagccgggggcccgcgctgagagatcggggttaccgcgcggggagccgcggccgcgctgggatccgttccctctcgcgggagccgccggccggggatctgcgcaccccacgcgccccgctcgggtcgggcctcccctccccgcggctgcccccgggccggccaccgctgcccagcgcgcaggtccctgccggatccccggcggctttcctgcccccactttacagacgtgaacgctgaggcggagggtgggggacgtggggccggctcgcctcctcctgggctcgccgggatgtggcctccgaggtcgccgcggcgctttcctgcccaagctggcgctgccggagcgcccgggccccgctcccctcacgggcctcgcagcacagacggggacaggggcggcctcgcgcgcacggggaccccggggtgggggtgggggtggggctctgcgagggccctaaaaacgctggggacgcgggtttgacgcactttcccggcagccgaagacgaccccggagcccctttattctctacgcgctcatcccacgcgcagaacagacacaggccctgccctcaccgagggttccagtcggctgtgcacaactgaagagctgctcccccttccctgcacgatgccatcctctcacacacagggcggggaccactccacagccccttacagcgatgttcactcgccccagagagctgctcacgccagtctacaccagacacatgcgcgatcacacacacacacacacacacacgctgcactgaatgtgtgctcatcatacacacacacacacacacacaccggccgggcgcggtggctcacggctgtaatctcagcactttgggaggcggaggcgggcggatcacgagatcaagagttggagaccatcctggccaacatggtgaaaccccgtctctaccaagaatacaaaaattagccgggcgtggtggcgcgcgcctgtgatcccagctactcgggaggctgaggcaggagaatcacttgaacccgggaggaggagattgcagtgaaccgagatcgcgccactgcactccagcctgagcaacagagcaagactccgtctcgaaaaaaataaaacacacacacacacacacacatgaactgccccatccctatccacgtatgtgcacatgcagctcccaacacccatacacaaagagctgttcacccactgccaccctgtacatgtcggtgtacacacaagcacacacgtacacagaacatccagcctcttcttcctgtccctgcacacatgcacaaatacacactgcagtgcccactccctatacatgccccccccacacacacacgcacaggcacacacactcttgcgtgctgactgcaggcggctggggaagagctgcagcctccagccctgctcctatttaaagagaggcattgctggaaaaggaacaaaagcaaagctggctataaatagccacctccctcccggcttttcctgccctccggcctcacggccttgcctcttctcgcctctcctctcctgtctagggcccagagcagctggggcaggcctgtccccaggggggcaggcagtggggccctggaggccaggtggccaagtgctgaccactgggcaggccagggtccctgggcctggatgggtgcaggggcacaggccggccatctgcagccagccctgtgtgcatgtacccagcacagagggagggaagcctgcctgggccagggctgctgcctcagcagaactgcaaaggctgacagctgtgtcagggagaaggcgtgtctgccaagtagcagccaccgctgccccaggtgtccctacccagcccggccaggcctttcctagtttgcttcctgggttggctcctggagcccagagccaaggatattgggtgccttgttaggaagcaggatggggcagaggaaggaatgtcaggacgggaggcagggaagggacacaaagtcctactttgggttccagtttttgtttgtttgtttgtttaagatggagtctctctctgccgcccaggctggagtgcagcggcatggtctcggtgctacctccacctcctgggttctagcgattctcaagtctcagcctcccgagtaactgggattacaagcacatgccaccatgtccagctaattttagtattttatttatttatttatttattttgagactgattttcgcttttcttgcccaggctggtgtgcaatggtgcgatctcggctcacctccgtctcccaggttcaagtcattctcctgcctcagcctcctgagtagctgggattacaggggcgtgccaccacgtctggctaatttttgtatttttagtagagatggggtttcgccatgttggccaggctggtcttgaactcctgacctcaggtgatccgcccagctcagcctcccgaagtacggggattacaggggtgcgccactgcagctggcagggttctggttctattacctacgggtccagcagccttgggcaaggctccaaatcatgccacccagcctcaccttcagcccctcttggagggatggtgggaatactgcatggaaacagctgtggctcgcaggcctttgtgagctgtggagggtcatggaataggagacgtgacaggctgccctctgtgtctgagaatcacttgataaagataacaataataatgtttttcatttactttttttttttttgtagtgatggggtctcactatgttgcccaggctggcattgaactcctgggttcaagtcatcctcccctctcagcctcccaaagtgctgggattacaggtgtgagccaccacgcctggcctttcatttactttgtattttccatgtgccagacactggactatgtttagcttatttgatcctctgggtttttttttgagatggagtctcactctgttgcccaggctggagtgcagtggtgtgatctgggctcactgcaagctccgcctccgggttcacaccattctcctgcctcagcctcccgagtagctgggactacaggcgcccgtcaccatgccctgctaatttcttttcgtacttttagtagagacggggtttcaccatgttagccaggatggtctcgatttcctgacctcgtgatccgcccgcctcggcctcccaaagtgctgggattacaggcatgagccaccgcgcccggccttatttgatcctctgtaaggtaggcactatttatattcccattttccagatgaagaaactgagactcaagtgcttgttccaaggtcacacaggcccctaaagcacagagccatgctgcaaggtagaactgggtctttctgagaccaaaggcctccttcctatgtcctgtactgctggggactagggcagccttgttctcgagcagcccctcctcaatggccagtggagagctgggccgggctaggctgcctcccccaggactcgatgggctgcgggaaggggtgactgcgggattctcccctgctaaggtccccacttggggtttgcagcatcagctccccccgtccccggctcccctgaggggcctcttcacttcagccctgggggaggggaggggagggagtggggggagctcaggcagacctactttcaaggttttaatcctttttgcttaaaggattttttttttttgcttggggaagacttggtctgatcagaggagagacgcagggagctgacaagcatcggaggttgggggatgatgaggagaaagaaatacatatttattaccctcaattattaaaaaatagatagtacgagatcttaggtcctggcagacactgcagcggtatttctgcaaggactgtcttccttccttccttctttctctttctttccctttcttccttccttccctccctccctcctttcttttttctttctctctttctcttttttttaatttttaattttaattttttttttgagacggagtcttgctctgtcgcccaggctggagtgcagtggcgcgatctcggctcactgcaagctccgcctcccgggttcacgccattctcctgcctcagcctcccgagtagctgggactacaggcgcccgccacctcgcctggctaattttttgtatttttagtacagatggggtttcaccgtgttagccaggatggtctcaatctcctgacctcgtgatccgcccacctcggcctcccaaagtgctgggattacaggcgtgagccaccgcgcccggcctgtctttctttatttcctctctctgtctcttccctcctccctccctcccttccttccttcctttcttttctctgtctctgtctccctctctcttcctccccacgcccgtctctctctgttgagattgtgacatggctagcttgttagtaaaaacactctggccagttcccagtggggggcagagggaaagtcaggtcccggcgaggaggcaggggcagcagccagggtcctccataccccggctaccaggaggggcccagacccaactcagcagcaagggtggggcgggacggatctgtgcccccgttttgggctgcacaggctgggtccgaggccggcgtgttgccccagctatttttttatgtacctgctgctctctcaggacaaaccctccaccaataacaggccttcccttgtgttgctgttctttccaagggagtggtgagagaggaatcgattccagctttctctgtgggggaggtgacagctctcgccccaggcttctgagggcttcaccagggggcactgccagcttccagaacacacccttatcctcccagggattggatctgcctgccgaatgggggccaggcataagtgtggtgcagagatgccaaggcagcctacgagagtcctgaaggcctccgatacctgatcctgcaggctggcagacgggcgggtgacacccacagactcttttgttatggctcctaaaacagggaaggcaagagggatctacggtgaggagaaaggccagggaggcaagcccaccgagaagaggactgtggcattttcatttgggtgcccagagtccccccagagcctgccaccgagaggcctcgtccatggctgcagtgatagaggacagtgatgcaggaggaacagcagcagcggctccgggaggccttgctctgccacaagaaggcacgctacatccactttgtcacaaactctcaaagccccagaaggcagatggcattaaccccacttttcagatgacaaaactgaggccagaaggatttaaagcatctgcccagggtcaggcacctggtaaatggcaaagcaggagcccaagtcccgcctgcctggccccagggccccggcccgtgtctgcttggcgcaatctacggaagcagcaggaaaacccgagcagaccagcattaacttcgagaggaaccaagcaagaagcagtgtcttggccgggcgcggtggctcatgcctgtaaacccagagctttgggagtctgaggcgggcagatcacttgaggttaggagttcgagaccagcctggccaacatggcgaaacctggtctttactaaaaatacaaaacttagctgggcttgttggcaggtgcctgtaatcccagctactcgggaggctgaggcaggagaatcacttgaaccctggaggcggaggttgcagtgagccgaggtcgcaccactgcactccagcctgggcaacagagtgagaccctgtctcaaaaaaacaaaaagcaggccgggcgcggtggctcacgcctgtaatcccagcactttgggaggccgaggcgggtggatcacgaggtcaacagatcaagaccatcctggctaacacggtgaaaccccgtctctactaaaaatacaaaaaattagccgggtgtggtggcgggcgcctgtagtcctagctactcgggaggctgaggcaggagaatgatgtgaacctgggaggcggaacttggagtgagccgagatcgcgccactgcactccagcctgggcaacagagcgagactctgtctcaaaaaaaaaaaaaaaaaaaaaaaagcaaaaaacaaaacaaagaagcagtgtctattttgcgggccaggaggcagaggcactgggctgaggcggggctttcttttccagtcgggggaccctgtttcagagacaaggaagaagtggccgcctggagttcaaggctgtggactggcagttcttggatgatgcaccagtgttctggggaggccttcacccttatctcacttttccaagcgaatggaaaccactttaaaatgcttcccgcagctccgcctgcaccgccttaggggacttctccctggccctgggcagagagggcagagggttcaggacagagcaaggatagtccttggcaaacagggtggccccctccaccctacgtgacctgtccctgctggtcttgagtttcctgcccctggccagggctggcatgtgtctgtcctgatcactcacacagctctggaggcagagaggcaaaactccaaagggcagtgagatgtgggctgtagctaaggccggcacatggagcatgcctggaaggaagttaccaccgctgctagcagtaggaatggcggcgttcattgagctcctgttctgggtcaggccacaatatagtgccaagagctttttaaatttttatttatttgtttatttttgaggcagggtctggctctgttgccgaggttagagtgcagtggcacgatcttagctcactgtagcctcgacctcctgggctcaagcaatcctcctacctcagcctctccagtggctgggactacgggtgcacaccaccacatttggctaatgtttttcacgttttgtggagatgtggtctcactatgttgtccacgctgttctcaaactcctgggctcaagtgatcctcctgcctcggcttcccaaagtgctgggattacaggtatgagccaccacatccggccaccaagagctttataagcattgtcttctttaatcttcacaactctaaagataggcactgttattaggcccattttacagatgaactcaagtctggagaaaaaaggtaattcccagatttcaacctggctctggtttaatcactccactcagaggtgaagggcttggccactgacctttgcaattaggccctccctaccaagccctttcctctgatgaggaggaagcttccattgagaaaggacagtcactggtacatccagagaggccacagggctcatggctggtgtggtggcgtactcctgtggttccaagtactcaggaggctgaggtgggaggatcgcctgagcccgggaggtggaggctgcagtgagctgggattgcactgttgcactccagcctggacaccagagcaagaccatctctctctctctttctctctctctctctctctctctctccttctctttcttttttcttttatttttctttcttcctttttttttttttgacacagagtctcgccgtgtcgcccaggctggagtgcagtggcgcaatctcggttcactgcaacctccgccacccgggttccagcgattctcctgcctcagcctcccgagtacctgggaccaccggtgcatgccgccacgcccgccttattttttgtattttttagtaaagacgggatttcactggattagccaggatggtctcgatctcttgacctcatgatccacccgccttggactcctaaagtgctgggattacaggcgtgagccaccaccccggcctcttttcttttaataggtaggctaaggggaattaggaatgtcatatttgggggaggtttgcaattttttttttttttttggcaacagagccttgctctgtggcccaggctggagtgcaatggcacaatctcggctcactgtaacctccgcctcccaggttcaagcaattctcaagcttcagcctcccaagtagctgggattacaggcgcgcgccaccacacccagctaatttttttgtatttttagtagagactgggtttctccattgttggccaggctggtctccgactcctgacctcaggcagtctgcccacctcagcctcccaaagtgctgggattacaggcgtaagccactgcaaccagttgggtttttttgagacagggttttgttcagtcacccaggctggggtgcagtggtgcaatcatggttcaccgtagccttgacctaccaggctcaagtgaccctcccgcctcagcctcccaaagtgctgggatcataggcatgagccaccacgcctggccaaatttgttttgttttgttttgagacagtctctcgctttgttgcccaggctggagtgcagtcgcacgatctcagctcactgcaacttccgcctcccggcttcaagtgattcttgtccctcggcctcctgagtagctaggattacaggcacatgccatgatgcctggctaatttttgcatttattttttttagtagagacggggtttcgccatgttggctggtcttgaactcctggcctcaaacgatcctcctgcctcagcctcccaaagtccggggattacaggcataagccactgtgcccggccttttcttttttttaatgtgtgctcagcggagcagaggtacaggaagaggttggcgatggggtcctggaaagatgaagggtgtgttacccaccgtgctctacggaacacattggctgaccatttccagtgccgtatgatgctgggcaagctgctgcagctctctgagcttcaattttctcagctataaggtcccttctggtgccgcagttgaaagtctacaaatacatcaaaatcacacaaatcccctggcccaaatcagaagcaaggggtacgcctttcctcatactccagccacagttttctgatgccacaagccacccagatcccaaagaaaacaaatgcctctgtacaccttcctcctctggatcacccacagtcggctgcactgcagacctaggccatgttcacagccccaacacacacacacacacacacacacacacacacacacactcttcctctccaaataattggatgatagtaattcaagtcccgtctggctgcttggggtggtgccaatggatgtcgccgacctcttgctctggccttcacccagccagctccctgtgaaggccttggcctctcattctgctcccctgcctctgctcagaaactcacaaagtgggtaggccaggctgccagatgctggctgtggcatggtctctaacagtggtcttgccaacctgagggtgctggcaaatcctacaatggaacattttgcagccgttaaaactgaggcttggctgggcacagtggctcacgcctgtaatcccagcactttgggaggccaaggcggtcagaccatgaggtcaggagttcgaaaccagcctggccagggtggtgaaaccccgtctctactaaaaatacaaaagaattagccaggcatggtggcacgcgcctgtaatcccagctactcaggaggctgaggcaggagaatcgcttgaccctggaaggaggaggctgcagtgagccgagattgcgcccctgcactccagcctgggtgacagagcaagactccgtctcaaaaaaaacccaaaaaaataaacaacaacaaaaagctgaggcttaggccaggcatggtggctcatgcctgtaatcccagcactttgggaggccgaggcgggcggatcacctgaggtcaggagttcgcgaccagccttgacatggagaaaccccgtctctactaaaaatacaaaattatccggctgtggtggtgcatgcctgtaattccagctactcgggaggctgaggcaggagaatcacttgaacccgggaggcagaggttgcggtgagccgagattgcgccattgcaattcagcctgggcaacaagggctagactccatctcaaaaaaaaaaaaaagaccaccccaaactgaggcttagaattacaaacataatgaaaaataaaacaaaattttgacacattaaaaaaaaggaattaccaacatagaaaggtgtttgagaaatactgttaattaaacgagacgggtgcatctgcgtgaacgtaggaaggaagcgtagccggattatgaaatgcacgaacaccctgggaggggtgagctttcccacactttgctctttgggctgtggggttgtagtgattttcttctttttgccaatctgtaggtttccaatctgtgtttgctccctgggtatgcatttgggaagttcaaaaaaattctgtggctgttgagtcaaccaacctcctcctccctggttcttgaggctttgcaacagttgggctcccaccaatccgccctaccactaactgatctgccaccgatccgtggcacgaacagtgactgtggcctaagcacgggttgtcgcgttgctctccagcctttccaaccttcctgtcaagcctctcttcctctcacaaagcctcccaggtgcacctgggagcaggtacctcacctccagccgccttccccctggcttgaaagtgccttccttatcacctacaccatcctttcacttatccagggtgtggcttctctctcctagcaggttgtaaatttcctgggcctgcagactgagcctcagcccagggtttactcactcccaccctgcctggaacacagtgagagttcattcaggaaatgactacaaggcacaggggctctggtctggctggaactgatggtgtaaatggggagaaaagggtgatgtatcaatgagacagggactgaaaaagacaaggctgtgcccagaactaagttctatgttgtatgctgtggagtaaaagggcagggttcgccgggcttggtggctcacacctgtaatcccagcactttgggaggccgaggcaggtggatcacctgaggtcaggagttcaagaccagcctggtcaacaaggggaaaccctgtctctactaaaagtacaaacattggccaagtgcggtggcttacgcctgtaatcccagcactttgggagcctgaggtgggcagatcatgaggtcaggagtttgagaccagcctggccaacatggtgaatcccatctctactaaaaacacaaaaattagctgggcgtggtggtgtgtgcctgtaatctcagctactcgagaggctgaggtaggagaattgcttgaagccaggaggtggaggttgcaatgagccgagatcacgccactgcactccagcctgggcgacagagcaagactccgtctcaaaaaaaaaaaaaaaaggcaggattcatgggaatcaatctctgaccttatactcaaactgcagcctgggccacataaacagctgagaaagagaggcatctgaccccgatgtaaagggggatccccagatcggccacttctcctcctgcccgctgccatagctgttgccttggtccctgaacccctggccaagtggctgatggacttgggactgaccgcaagttctggtactctccaaaggaatctcaaaccactccacaggccacaacacagaatgccggccctgtccacagccccagccacggagacagccaggtactgtagcaagcacatgcctgacgcagggcctttgcacctgctattgttccttctgccaggagagccctccccagggagaagcagctctaatgtctgcagcgccctccctcactccctcacttcgcttaggcctctgttcgaatgtccgtctatcagaaagacttctctgccaatctcctaaaataaccgctctctggtcaccctctgttcttcaactgttaattttcttcaaagcacttaccccacctgatagaatatagttgtttagccaggcgcggtagctcacgcctataatcccagcactttgggaggccgatgtgggtagatcacttgaggccaggagttcaagaccagcctggcctacatggtgaaaccccatctcttctaaaaataaaaaaataataataaaaaataaaaaactagccaggcacgatggcaggcgtctgtaatcccagctactcaggaggctgaggcacgagaatcgcttgaacccaggagacggagattgcagtgagccaagatcttgccactgcactccaacctgggctagcgagcaagactctgtctcaatatatatatagttgtttattgtctatttctccaccccaactagaatgtaagctccaaaaaaaacaggaaacttggaatttatttatttatttagagatggggtcttgctctgccacccaggctggatggagtgcagtggtgtgatcacaactcattgcagccacggtctcctgggctcaagcaatcctcccacctcagcctcccaaatagctgggactacaggcacacaccatcatgcctggctaattaaaaaacaaacaaacaaacaaacaaacaaacaaagcactttgtagagatgaagtctcactatgtttcccagactggtcttgaaatcctgggttcgagtgatcctcccacctcggcctccctaagtgttgggatcacaggtgtgagccaccatgctcggtgccttggattttattcatcgcttcaccctcagtgccaaaccagcagtaggcaggcagttcatcgttgttaaataaacgtttgtcggccgggcgcggtagctcacacctgtaatcccagcactttgggaggccaaggcaggcggatcacctgaggtctggagtttgagaccagcctgaccaacatggagaaaccccgtctctactaaaaatacaaaattggccgggcgtgatggcgcatgcctgtaatcccagctactcgggaggctgaggcaggagaatggcttgaacctgggaggcggaggttgctgtgagccaagatcgcgccattgcactccagcctgggcaacaagagtgaaactccatctcaaaaaaataaaatgaaatgaaataaaaataaacgtttgtcaaatggagacagccctccatacccctcctggctgacaagataaaaggtgaccgctcatccatggataaagaactggtcggtgatcatggtctgtaacacggtccgacaggagtcatgacacggctggctccactgggctcttccttctgggaaagccaggaattggaggcacctagctgtgggaggggaagatgaaaggccgtgctggagagcaaggggtgggtccatggctttggatgtggggcaagaggaggagctggcggggtggagggagaggccagggcagagaggccaggagagggaccacggagggctgtacattctggagctcctcccttgcctggaggctttgggagtccaggtcactcatctccttgcaataatcccccatttccaatgagctcccatgaatctctgcaatcagaattggccatgaaagcagaaataccagcccatcaggggcagtgggccaattaggtaagatgatcattgccacaatctcaaggcagccccggggctaactgccaccccacgagtcacgtgtgagtggtaaaatgtcccctttggctggtgcattctcttgagcatagcccaagaagttcccgagcctctttccctcggcccctcctcgcttggggagattctttttaaaccgcaggcctgagcaacgcccctggagccctccctgggaggagaggaagcagttcaaagtaacgagtcaatttcacagatgggagccaagacaaaagaggcagcgtcttctcaccccaggcaccacccgagctcagcttcctctggcaattttagcatgtttggtccggcctcatttagacatttcagatctctgaagcccagagagtgtccatgagaggtttccgtttgccacggagtcgatagtacaaattttgttccaaacacatctgccaagtacaaccctaaacttttccaagcgagaggttattttcctaacacagcgcctgctctgctgggcatcctctgtggtccagaaggccagtctttccgtgcctgctggcttcctggagccacaaggaacacagctgggctgcggtgaggcggccctaaggccctgcccaagctactgagcccctcagagcctcggtatcctcatctgtaacttgggactaatgagacgtgcgttttctgcttttaatgaggcattgcacagggaaaagtgcgtggtgtaggactcttctctgcatcctcctcactaaaaattccccatttcctcctggttcctggtactgtttctatttttttctttctctttttctccttctctctctgttttttttttaagccctagatcacgatttaatttctcttatggttacagaacaatataaatattaggttttggtactaagtttcttgtggtccaacctatgtacaatcattcaatcaacatttattagccaatcaactcaagtctactgatccagcactttttacctaatgtcactatgtgctatgttcttcttcttcttcttttttttttttctgagttggagtctcgctctgtcacccaggctggagtgaagtggcatgatctcggctcaccgcaacttccacctcctgtgttcaagcaattctcctgcctcagcctcccaagtagctggaattataggcacacgccaccatgcccaactaaattttgtatttttagcacagacaggatttcatcatgttgaccaggctagtctcgaactcatgacctcaggtgatccgccctcctcggcctcccaaagtgctgggattacaggtgtgagccactgcgcccggcctgctatgttctattttgtgcaggatgctgttttagtggggtcctgataggaaagagcattttcagattgagtaatttgatgaataaagaagaagagagaagtgagggggacagggaagccctaagagataatgtcataaccacccccaacacatacagacccccagggctaagtgagggggagctcttactgaactcacaggtagaaagagctgccaggagggctagtggcaggggctgtgtagcagatactgcgagggcctgcccacagccctggctttgaccatttcggcacaccagcctgacttccagctgcaaagacttgcatttctttgcctcagggctttctctagcagcggagctggctttgctcacctacagagcaggccaactgtgctgggaatgaataccaccacaggaacaagactcagccagtgaccggtgggtgctggaacataaatacccctgctccctcaccctggaacataaataccccagctccctcaccctggaacataaataccccagctccctcaccctggaacataaataccccagctctctcaccctggaacataaataccccagctgtctcaccctggaacataaatacgccagctccctcaccctggaacataaataccccagctccctcaccctggaacataaataccccagctccctcaccctggaacataaataccccagctccctcaccctggaacataaataccccagctccctcaccctggaacataaataccccagctctctcacccttggggtttgatagctttgaggtgcgggttctagactgcatcccaaagctgtgcagcagggttaagctctggtacccacagtggtaattacttgacccagtgagtccctgactggcttctcccctactctgtttcaacctctcactcagttcctggcatttccttggatcatttcccaaataaactacttgcttgaatttttgaaactcaggctgtgcttctgggaaaatctttcagtaaccttttgggagggacacccagtgcccatggggactcacccttggccaacccagctggaagtgggagggtgtggaagcccactgttgaacttggacaggccaaccctggaggacacagagcagcatgagggatctggaggggcacagggtggagaagttgcagtctcctcatggaactcaccaactggcggggaagacagatcacataaaagtattatcatcgcaacaaggaaggctgagtaccatgacagggatgtgcagagccccacagagctctcaggaccccccactctccccattcaaggcatggagggaccttccccagaagatgtgtataagttgagacctgaggatgggagtgcaggggaagcagccacggagtgttctaggcagaatgagctgcttgagcaaatccttcaagacaaaagaacatgattcaggctgggcacggtggctcatgcctgtaatcccagagctttgggaggccgacgcaggcagatcacctgaggtcaggagttcgagaccagcctggccaacatggcaaaaccttgtctctactaaaaatacaaaaattagccgggtgtggtggtgtgcacctgtaatcccagctactcgggaggctgaggcaggagaatcgcttgaatctgggagacagaggttgcagtgagctgagattgcgccactgcactccagcctggacgacagggaaggactccatctcaaaggaaaaaaaaaaaaagaacatgattcaattgaatccaaagaagttcggtagacctggagctcagagttcaaagcagtggggagaaagaaggccagagctgtggtggggccagggggaaggacatggcaggccattccctgatgaaaaagggaatcgctgaagggttctaagaagagagagacaagggcacagggcactgtggaatccggccgctgtgtaaggcctggtttcagcaaaggcaagacaggaggctgctgggagggtcaggagatgatggtggcctgggctcaggtggaggcacagcaggcagtggcggaggaggtgcaaagggcatcatgggagaagggcagggcttcgcgaggcacggagggtgtgggaagggcaggggtcagctcttgggctgggggtggctggagagcaatggtgccagatgccatgatggggaaattgcggaagaggcaatttcagacacgccgggtttgagaggcctttgaggccaccaatgagggcactgggggtcggtgggcaggtggctctggacatcagaggctggagacgggatatctggggagtcagtcaatggccggccactgcagccacggccgtgctgaaagcccccagagccaagcatggcgctgcccggggaggtgccacattggagaggtggcaagaggagggaagctggccaagacggccgagaggggcagccgcagaaccatggaggctgccatcagggaagccggggaagcaggacggccaacagggccgatgccccagaaggtcaaggagataaggaaaaggtctgtcgggtttagtgtcaagccagagcagtgactgtggatgccagggaaaaagcagggtctggcttgaggagtgagaggtgagaataaggagtctccaagtgtggacaaccccttccttgatccgggcagagagagccgagcggccgcaaggggtccgaaaggaggggatgcaacaccccatcagccgcaggtgacagaactcaaacccctcgccctgtggacagcggacagtcctccttgttaacaggcaacgctcagcacacccagtggcttcctatatcctgctaggagggaccacaggggactccagagcctccaagctggaggggcggccagggtggcaccgaggccaagggaggaagcccttccccctgggtctggctctgatcatggcccccctgccctgggctctgacattaggtaccatttgaagaaactcctgctattgaaaaacctttgaaggccgggcgcggtggctcatgcctgtaatcccagcactttgggaggccgagttgggaggatcacctgaggttaggagttcaagaccagcctggccaacatagtgaaaccccgtttctactaaaaatacaaaaattagccagttgtggtggcaggtgcctgtaatcccagctacttgggaggctgaggcaggagaatcacttgaacccaggaggcagaatttgcagtgagccaagatcacaccactgcactccagcctgggtgacacagcaagactccatctcaaaaacaaaaacaaaaaacaaaaaaaaactttgaaagaccattgatctagtcatattacagatgggtaaactgaggcccagagatgaggagacatgtctggggttctactgagtccgccccagagctgaccgaacacagccccagggtgccagctccgttggtctttccacagccccacagttcctggaaaggaaagggccgtgacaagggcaaagccagggttgcatacagggctgcggtgagagacggagtctggcagcgtgtgatgagagacagagagacgcagcgtgtggcatgcggcacatgccagcgacaggcggcagcaggcgggcaggcgggaggccgggctgcagcgccagagcatagccattgtccccagcgtccggcctgcccaggtgcccctcactggccatcaagtgacctccctcggccctgcctcccctgaggctggccagctgtagaccccaggcccacctccacacgtgctccttccttctcccagcttgctcagacaagcccatgaatagaacattaaaggcaaaaccttctaaaaggaaaagcagctccctggtaggagtcaccccactaaatgtcaaatgcagagcaaggcttcttgccttgtgcgcttctcactcatggagtcaccttagcctccatatccccatcatcctatcgccgtataaataaatcatggtcagaagaatgccaatttccccccagggcctcatgaatctctcaacataagcatatgtaaaggcccccttcactgcgtgctggtcctggtgcccagaaagagatagcaaatcctgtggggatgattttggaggcagaagcaaactttctaccacctcagtgggctgaaagttgggagcccagcttttgtcctgatttgggaaagacccttgctcacgtagttgtcaccatgatgccactaccctctggaatcaactcagtgagctgccaagtggcccatcgctgggggctgcagtggtctgtcccctggcagacatgtcacgagtcgtgcccacccaccccctgtgagggcgagccacacacccactcagcaagtgttgttcctgacatgtggcacacacagcgctggcctgcccactcctgggagcccctgcccccactgactggctcaccatcgtgccacggcaccgagccctgccagtggaccaatggtgtgggtgccagcagaggctctggtgcactagggtgtcctgctctgcaacagtgacctctgccacacacactacagggagcctgttgcatgctttgccaggtgtgtttctgtacatacacacacacacacacacacacacgcacacacactatggtaccaactcttttgctgtgccagcacagaggtctccagagcgactctcctgaatcagatagcaggggctgtttgcagtttcgtttccacgcttcgctgactggttagacagtgatcacaggttcggaagcacgagcctcaccacagcggaggaggcctccactctgaagcgggattccacgctcctgcaccctaagatcagctagactctctgccttgtttcatcttctttcttttcctaaagaatcacggggagaactgacctctctgggactcaaccgtggctggaaggggacaggagaagccctttctggaggacagctgagccctgcagctgccatcctgcctggcaggctagggctgggctgcgggaaggccccccaggaggtagggagcactacaaggcaagaggggcaggtataggtggtggagccagtgtgttccggggctgtgctagcaagtccatcaggtcaccctggagggaagccagggagagcaaaccatggggagggctgagatcccaagcagagcacagccccccaataatccatggccctgggccctcctcaggggcgtgaaagcaggcaggagggttcctggcccactgtcccatctctgtccccaaggaagaaaccagggcaggagacagaggtgaggactgtgtcttccagacaccgggggagagggagtaggagaggacatatgagacagcagctcaggccccaggagtcccagatcccagccagagaggctcctgaggaaccgcagaggggagtgcataggaaccaccagcaagctctgcgagaagccagaaatgaatcagcagcgcccagcgccccacaaaacaaatgtcagagaaatcaagacagatgggcacgtgagacagtggagcacagaggtccagagggcaagggagacggtgggcttgacagacagagcgggggctgcatcctgactcagcagtgcgccggctgggtggcccagggaaagggactccagctagctatgcctcagtttcctcatctgacacggaggaatgagcacagacggatcctgcagggtgggggtggaggtggcatgagataaggcgtggagcacactcagtgaggctgtaacaagtgctcagtaaacacaagcggctattggcagcatgtggacagtgacgggcaggtggggaagagcaggttattgcctgctgcctgtttccagctagcatccatgtctcctcccagcaggcttggctgggcatgctctgtgaagcccgaggtggctgggactcattctagtgatggacaccaagtcagcgggctcctctctccagttcctcgacatccctggaggcccctctgctcctgcagccctagccttggagctgatggttccctcagtcttctccaggccttggggggggccctcacgctagggtcccttcccaactcctctctctgtctcatttctgcccagggaggtccggccactgcaccccgaggaaagggctgctttcggcactctgcgtggaggtcctggcttctgccgtccctggaggctccgttcccgtttcgccagctattttgctgcctcggccatctgttccctccctgtcatctcctctctgctttaaccttaaccactacttcactgcagatggtaccaggcagttctgctctcgacatccttcacgacgcctggccctccttctcatctccagcaagtgaaccgctctgtcctttttaaagcctcatcccaaagacacggccagagcttggagttggattcgccccacacaactccccctctttgatgccatctgctttcaactccaccactggccaggggcaaacacctaccccttcccctgccttttcctcctgagacttcttctcaaactcggccaagaagctctcctggcatggacagcgtgtctgctccgggtctctacctggtctccatcaacagagccatgtaaccgcccagagggctccaggtccgcaagctgaggcggaggccagaaactctgaagttcactcctactgtggaggaacgagggctcgtgctgggagtttgggtcatgaacagtttccctgtagaaaatggacctgaacactctgcagtaaggaattgtttcccatgctggcatggtgggaaccgaaccaaaacacattttctatgttgtctgagctcacagggaacatccctctgctgtccttgctgttattctggcatgctggtgagaaaatgcatgcatgggctttacttagcaactcgctctgcctctcctctctgtcagggcgctcccctaaaatctctcctcttgacgtcttttttctggcataaggacccggagctttgaggagcgcagcagcccagaagctcctaaggagagaagctgttttggtgagattggttccaccaggctacatgccttgactgggacagaaatgggctgggaaggccgaaatttgacttctgcacctggatttgggctaaaaagtctcacagctcagcctccttgataagggttcttctatctcccctctatacttcctctgcagcagaaaagagtatcttggccgtgcagggaacgctcttctctcactctcgccactggggttaagggcagctacattactatagctccaagtcttggttgcccccagagagaggcagagatgtagcctgcccacatctggacacttgaagactctccaaacacctagaggagctgtggattcaagtgaagcaaccatctgatgccaccacggtccctccttccctttgccttcccttcttcccacaaaagagaagcccaaatccgccaccagaccagcccatctgcccgtggaaaccaagggaaccaaatgcatcgtactgggttgcaggccttaatctagctctcgctgaattattcagggatggcattaacttataaatgagtgtgtttgactgattttgtggttgatgtacagataaagtctaatgaaagacagttataagattttaaattattaattagactgccacttaacaaagcctatttggcactctattttcttgcttaacaagacaaaaactttaaggaaaggttctgtattagcccagaggctctggatttgcattctgttttcatagctctacacaggaaagccacgggtcccgaccttaagtagaggccacttctggcaaagcaaaccccccagcgggccgcccttccttcctggatgttgccgggtggcttggggcctcgcttgccctgctgcctctcacctcttaaccagaggcttgcttttaatatccctggttttgccggctaggccacgagatggagaagcagggagggcagctgctgaagccttcagctaccagcactgtcagcagcttggtcccactggggttgttctagttcacagaggtggggctgtggccagtagagtcctttcattaagagatgcaaggcagtccccctcagtcctcccaaaatgtcatgccaggggacagctttactaggacaaccaggaatcagagagatgatccttatggcccaaggtgtgctccgccttcctcctcctctggggcttcataccactgcacccctcactgcatagggcaccccattatcaagaccatgagccctgccctttgcagaaagatgaggggttttttctcttccctccttcccacaggatctagggagggctaccctttcttcatctttcaaacccttttcagaatcataattaaattattacactccctcaggtccaggaccccacatagggctctgcatattataggcaagaaaacagcaagaactatttaaacacatcctatacctttttttttttttttttttttgagacagagtctcgcatcttctcctgggctggagtgcagtggtgcgatcttggctcactgtaacctccgcctcccgggttcaagcaattctcctgcctcaacttcccaaggagctgggattacaggcatgaaccagcacgcccggctaatttttgtatttttagtagagacggggtttcaccatgttggccaggctggtctcgaactcctgacctccggtgatcctcccaactcggcctcccaaagtgctgggattacaggtgtgagccactgtgcccggtctttttttttttttttttttttttaaatagggtctggctttgtcccccaggctggagggcagttgtacaatctcggcccactgcagcccccacctctcagactcaagtgatcctcccacctcagcctctcaagtagctgggaccaccagtgtatgccactgcaaattttttaaaattttggccgggtgcagtgactcacacctgtaatcccagcacttcaggaggccgaggtgggcagatcacttgagaccaggagtttgagaccagcctggccaacatggcaaaaccccatctctactaaaaatacaaaaaatgagtcaagcatggtggcgtgcacctgtagtcctagctacttgggaggctgaggcaggagaattgcttgaatctgggaggcagaggttgcagttagctgagattgcaccactgcactccagcctgggcaacagagtgaaactctgtctcaaaaaaaatttttttttgtagagacgaagtcccactctgttgcccgagctggcctcgaactcctggtctcaagtgatcctcctacctcggcctcccaaaatgctgggattacagccatgagccaccacacctggcctcctgtatcattttcgcttggaaactttgggaagaattctagaagcagacacttcaatggccacctccctgggcattagcctcaggcatgcttttggctttgggcgcctacctagaatccatacagagaatctgagtgtcctatacaggtgtgcagaagaaactaatccaaaagatcaggatctggggccaagagagaaaactgcctgcccaggaaagaaccaacacaagtcacccgtccacacgatgccctaggggcggtctccaggtcacccaggctgagcccagcccagtgaagggcttctctgctctgcttcctttgggccaatccaggtggaaacctatcggtggaacctcttcagccaaccaggctgtgcaggaaggaagaaacagcccgagtggcaaacacacgtgactgctaagcctccggtggccgcctcttgtgcagggtaaggagcctccccccggggagcggcccccacagtgcactgtgctcatccacagctgggcctctggctagccagggtgggagagaaaggctcttggaggctgctggagcctccttgggcacctaaaccatataaataaagtgtgtgggctgcttggtggctcatttttaactataaactgccaaaagacaaaagaccaaaagggaaatgagatgtcagttcctctccattatccctatcacagacctgcagcccagacatggcggcctctcagagctgtctgggaagccttctcgaccggggcaagtttgcacgctccaggcccaagtttctcagacccgggcttctgctcagctctgtaaaaagcaccttctctgtgcaaagacactttggccagcactgctcggttgctgaaaggactttttgtccctttctgcagggaaaaggagaacctggggtgtgtctgcgaagcggtttctccaactagccccagaaactcttccataccacagcgaaggcagccggcgtttccccctgaactgcaccgacccacgtggagggcacaagtcacacacaagtttgttactattccaggacgacggggcaactcagcttcctcggtcggcccaagctaggaccaccacacggccttcactgccccaccaaaggcgtggttcctccacccacctgcctgacctgcttatatctgggtcttcgccatcacctccacatctgcttctctccgcccatcttagggcttcgcttccccccacctccccaacctcccccccctccaccccctccccgtgcgcgttttctccttccccatcctgctgtgaggtcagaatcctgtgcttacgacacctcggtctgttgccatggaaacaggggcggattaaggctggagcgtggagcgcagggatcaggcccctcggctacctgagctcccgcctcagccgctcccgcagggccggggcagccagccgcaggcgccgcggcttctcagcctcctggccgggccaggcgcgggggggatcccggcggggcgccacagcctgctcgggcctgggaggggagaggcagacgcagaggctggaacagctggtggcggggcccgtgggctcccggcgtgatcacctgccctcccagggcccgggggacggcgccccgcgtggcaaccacgtgggggcgcggcgggacttccccggtgcccgcaccaactttgccgcgctccgtaccgggccgggctgctggggcgtctagctacggtggtcgcgaagccagctgtcctcaagttgagctgtgcaccggtcgcgcacactggcggcacggctttcgcgtccctccgctcccagcataatgaaagtttgaggaactggacatcaggcgctggccgctccccaccctcagccgctgggtgcccagagcccatccctagcgatcagagcagaactgcagagaagacgtccgcgtccgggccccgtctggggagctagggcgcgcggggagcgcccgggccgcgcggtcactgaccgctggctgcacgggggcgccgtgcggactcggcctccacaaagcggcagaagcaagggcgtgtgcccgcgcagggaatggaggctgcaagtgcaaaactttatcccagcaaagcaaaggtcccaggaggccggctccccttccaccaccggccgctcactctggtctccgactgacccctccgggccggatctctaggcctggccactcgatccatggagaaaaccccgtgtctcacaactggccgctgacgggagctgagccccagcagcagcccctcggcgggtgcgcccggcaaaacccaccagcccgccgggggctacttcccagaccgggagccccggcgccgggcggcgcccgggctcgcggctctttccggagcgcattcaacttcaacttgcccctgcggctccaactcacctttgcgaagcatgttggccacggggccgccgctccgaggtcggcctaggcgcactccctcccggggtccagattcaaatccctgggcgccagctgcagctaatccgagcgcgtcgaggcgggggcaagccggggatccgctcgtgcccggtggcccggccccgcaggggcatggtgagctccagccccgcgccgagggcaccggcgcccgcaagcaaccgtggtgctgcccggcagccccgcgcgcttgctcagccccggggcgagcggcttgctccgcggagccggcggcctgcttctgccacccggagcacttcgcaggcggttttgaggggggacgccgccccctggccggccggccgcagccccctcctctccgccccctcggaccaccgccgccgcggctgcagcaaaagggcgctcgcacgcaccgccgagctccggggaaagcgcccggcgcgcgtttgcaggaccgagcgatcggcggagcggggcgcctcccttcctccccccggcttccccctcctctcctcctccctccctcccttgctctctagctccctccctctcgctccgctccccgcccccgctcacggagcgcctcccatacaaaatttatgaaagtgctctcagctcgcagtgccgagcgccgtcctattcccaaggcagcagcgctcagccgcgcggcgccgcctcccaaggtgttttcactgcgcccgcccccggggaagatgctcggcccgcgtccgtccaggcacctgcccccagtccccaagccggtcctcggaccactccacgcccctccccggccccgcaggcctcctggagcccgaacccgcagcccagcccccgcccgctcgcccttcgcggctggaggtcatcgggagacgcggctgggacgcgaggaccgccgcccagagtacggatcgcgagtccgctccctgccccgtctcctccctggccagcgccccttctcccagtctcgacggctcttccccgcactgaacagctccagcgaacccggctgccccgcaccccgagtcccaggacactgttctttcgtggggagaggaggggagcaagcattcggaaagggccagctgcaaattccagggagaaggaaggacccgtgcgggttcgggtgggccgtctccgcctgggtggggtggcggcggggggtctctgatctcccttggtccacacagaccccgccggggggttcgcggaaaatggaggaggcgccgcttggaaagcgggtcccgcaggggcctgttgagctgagggaagagaaggttcgggccaggcgagatcctgggtggaggcggcaccccctgctggcctgggatcagagggattcggagagaagaaaaagcggatggaccaaggctgtcattcaacacacattcaccgaaggctcagcatgtgtggggcactactgttcctgaaaattcagcagacgaaaaagacttgtctttgccctgtcctcaaggagtttccattttaataggggccaaatgaggaaagtccagagaagatgggaagattgtgcttcgaagaaaaacaagcagagtattgttctggagctgacacgggggtagaggtggcagtcaaggaaagctgctctgagcaggtgacatccaagcagaaatccaactgaatccctccttgtaggaaaaggtgacatgataggaaggtcaaaaagaaggtcagggccgggcgcggtggctcacgcctgtaatcctagcactttgggaggcggaggcaggcagatcacgaggtcaggagttcgagaccaccctggcccgcatggtgaaacccggtctctaataaaaatacaaaaattagccgggcatggtggcaggcgcctgtaatcccaggtactcgggaggctgaggcaggagactcgcttgaacccgggaggcggaggttgcagtgagccgagatcgcgccactgcactccagcctgggtgacagagtgagactctgtctcaaaaaaaaaaaaaaaaaaagggccaggctgggcgcggtggctcacacctgtaatcccagcactttgggaggctgagcagatcacttgaggtcaggagttcgagaccagcctggccaaggtgaaaccccgtctctattaaaaatacaaaaattagccgagcgtggtggtgtgcgcctgtaatcccagctacttgggaggctacgggagaatctcttgaacacaggagatggagattgcaatgagccgagatcacaccactgcactcctgcctgggtgacagagcgagactgtctcaaaaaaacaaaacaaacaaaaaaaaagaaggccagtctgacgtattcactcacacctgcatttggtggcactgaagcttcagatttgagctaaggctctgggcttggacttccagaagcttcaggtgtcgtgggaaaagaaagacccgcaaaccatcttagagtgtgactgacagaagtcacaaagactgcgaaagggctctgctagctctgccaggggctaccagataatcaggaaacagtcacagaagaggtgcccttggagttaggtcttgaaggctgagttcaccacactaagaagggggaagggcattccacgtagatgcttgaaggtgagaagtaaccttgttctgaagatagataagattggtccttcctgaggaccatgggctcacacctataatctcaccactttggaaggctggggtgggaggattgcttgaggccaggagtttgagaccagcctgggcaacagtgtgagactccatctctatttcaaaaaaatgtttaaagataaaaaaagatggatggctgctactctgggcacactgcccatggccacaggagcagttaaacacgaacaaaaaaagattggtccctcttggcgtagaacagaaggtgaggtattccttctcttagccaccagctacaaggcagtgctcaccccactgcctgccttagccctgacactgggagcctgagaggtcctctgtaagtacaccgaggcccagagaggatgaacaacttgctcaacgtcacatcacagatcagcgataaagtgtgggcctgactcagggcctgaatgtgggataatcctccttccacctctccaagccgcctccccatgaccccctagcccacaaactctagcgtcttaggaaaagttggctggggctgggcgtgagtgtgagaagcagagttatttcaggcctcaggagggttgggtgctgccttggagtccagccagggagtgggggcgagtgaaggcgggtgttgtggtgtactgtgggggtgcactgtgcccgccttcttgtcaggcagtaattactcagactgctgagtaactcaggcagggagacccccacagacagatggaggtgccctcagcccaagctgaatggcagcccccaatgtcctgcaccacggagtcttggggaagcattctcacatctgttcttcatgtccagttctcctaggcatcatccggcttcctaatgggggccagagcagctcattaggcacagcgggtgcggggcaatgttactagagggatgggacttttgccatcaaacaggccccacctctgatgagggaaaggtcccaagggatatggcgcctgctagggagaagccattgctcagttggagccagtcctttccccttgaaactccatgctgcagtcacagctaaggctgtccacaggctgggcagcagtgtcctgagagaggaggggctgagctcccagaattcagatcttgcaccctggggatccagagaagctggggggagatgggaaggtctagtccggacgcttatcgagttgaggggagtgttcctgggacccacattggtcacttttctgtctagagctacctgtcctaagagtgccggtggcctggggggcacagcactgacccttggtgatggtccctcagctgctcactccctgcctgtccagccattcctcctctctgggcagcctcccaggcagggcctgtctctggctgcttgtttttacttctccctgcaccttaattaggggtttccaagcagggagggcctctgggggagcccgaggacacagagctgacttaaagggccagctgtgatcacagcaccaccgcagagagaggaggaggatgccagggggctgggtagaccgtcagacctggaagaccattgttccacgggacagactgctgagggccagtcctgcaggtactttgctcttccacaggtcaaagccgtctcactggctgtcttctctttggggtctctggggctctggccagtgatcaggagaaagaccagccctgaggggcagggcaaaggttggccagggtccagaagggttagacatcacagtcctccactgcccaccttcccaggaaagcaccctcaggctgtgggccttccccagaggggcagtttctacagggtctacgcagtggattctaaaggtgataaaggctgggtgcagtggctcgcgcctgtaatcccagcactttgggaggccaaagtgggaggattgcttgagtccagaggttcaagaccagcctgagcaaaatagtgaaaccttatctctactaaaaaaaaaaaaaaaaaaaaaaaaaaaaattagctgaacgtacgcctgtggtcccgggtactcagggggctgaggcaggaagatgaattgagcccagaaggttgagactgctgtgaaccatgatcgcaccactgcactccagcctgggcgacagaccaagaccctgtctcaaaaaaaataatttaaaaagctgataagggcgatccacaaacctgcaccaagactctcaacttggagctgggctggtggtccctgagttctgtcctgccggacagtagagtccccctaggtagggaacgtggccccacacggcggccgggtgaccgaccactgcttaccaggaggggagactggcagggggggctcaaggaacatctggtgggtgtccccttcacaagactcggcctgcagagttcgtgcagggagttcgcacataggagagcaccggtccgggagtgccaggctcgtgcccggccggggagaggagtgggagactaagtcgcagggcaagggcaactgcatagtcggggacctctagggaatcctgagtcccggcattctgggctggggtggagcccactacagccccgcccctatctcctcctttatggccccgcccagcgggtatcccccgcccccgctggccgatcggcgatcgatcgcaatgtctgcgctctccgcgttcttccagcgctgtctttttagtaccacatgcgcaggcaggtgatggcggcgctggtcgtatccggggcagcggagcagggcggccgagacggccctggcagaggtgggtgctggaacgctgcgccctccagacctcgcatctcggggcggggcccccaagttagggacaggaccaaccccctttaacggcggcggcgcctttctccgctagatcccgctgttagtcgccttgggccgctgtcaccagctcggggtcgctgtcagccggagcccaggggtaccagtcttttgcagctttagggcacgaccgagagcagcccttaatcctccaatcggaaactacagccttgtcttggcgggtagacggataaaatggactcgacggggagggaaagggccaggccagatgcagcgggcattttacgagtgcgccctcagggaatgctttcagggaagaggcaaaaggtttcattcgccaggcattaactgagcgcccaccgaatgccaggcctgcgctgggtgcaggtactagaatcagagatctcagtctactgggggaatgttaatgtaaacatatcatagccacgtgataaaggaggaggtgcctactggtccctgggacacattgaagggctaatgttagcagttccttacacgccagcgaccactagggacctgtcagaggaggatctgtaatgggcctaggaagcctaggctgattgtccaaggcttttgaaacaactggccaaaaaccatagcagtggtaacgttcaaatctgatctcagggccccagcctccgctggaccatccccaccgccgcccacacagtgggtgaagcctcatgtctgggcgggtccctcctatcatagtgtggggccctagcagaagttgtggcacatagcacagtctcaatacatattcgttgaataagttaatttcttgccttttcatatcctcagactctgtggctcctgaagagataacggggttgaactaagcttaattgtcggggcagggcatagtggcttacacctttagtctgagcactttgggaggctaaggaggattgtgtgagcccaggaattccacaccagtctgggaaacatagggggaccctgtatgcacaaaaaaataaaaaatagccgtgcgtggccgggcacggtggcttacacctgtaatcccagcactctgggaggctgaggcgggcggattacctgaggtcaggagtttgagaccagcctggccaacatggtggaaaccctgtctctactaaaaatacaaaaattagccgcgtgtggtagcacacgcctgtaatcccagctactcgggaggctgaggcaggagaattgcttgagtccgagaggctgaggttgcagtgagccgagattgcaccactgcactccagcctggccaacagacagagtgagactctgtctcaaaaaaaaaaaaaaaaaaaaaaattagccctgcgtcttggcacatgcctgtggtcctagctactggggaggctgaggtgggaggattatcgtttgagcccaggacgtcgaggccgcagtggaccatgattgcacccctgcactccagcctgggtgatggagtgagaccctgccttaaaaaataataagatgaattgtttattcagcttattattttttatcctacttaggagtaggatgagaccagagtaagagttgcagtttgctaagggctacggtttcccctttactccaggagttgtaattatgtgtatacctgtcttttcccccactagactgctggtctctaagggacaaggtcacttttctgtccttactggtacgtccaccaccctgactcaagtgttctttccatccttcctggtttaagagtaaggaggagcaatgggacagctaagtcagttaaatgtatgatgtttatttcccttttaaatgaggagaggtaagcgtgaaagaacgaacagtgtggccacagtcagtggggttctgagtcaggagggcagtcttttaagttagtattcatgtttaacggtttgcttatagacctcatatctagaagctcaaaacttcaaggtgtcctcaggaggtgggagaggggggacattctcccaggctggctgggctggctagactgactcttaggttttccgcagggctgttctctatcagggagcagtatatggactcagactcattctttgccccttagcccctggtgtcacctctgttctcctgaggaagaaggtgagccatattctattcatgggctcaagtcttcgattcccagtgatttcacaacatggaaattataccggttaccttctggcttaatgaattgtctctaccttcaggatgaattcagtgagaacgaaagctgggccaacccccttggtgtctggatctggcccttaaacttggtggagttaacagcttagctgggtcttgttaccaaactcaacttgggtcttcccatccacacaaagcaaaagccaaacactgacatggagatttgcagggagagaacaagcatttattgtaaggcaccaagcagggagactgggcagctaaagcttaagacctaaacttcctgatggcttacaagcaaagggtttttattttatttatttatttatttttgagatggtgtctcgctctgttgcccaggctggagtgcagcggcgtgatctcggctcactgcaagctccgcctcccgggttcaccccattctcctgccttagctgggactacaggtgcctgccaccaggcccggctaattttttgtatttttagtagagagtagtatttccccgtgttagccaggatggtctcgatctcctgatctcgtgatccgcccgcctcagcctcccaaagtgctgggattacaggcgtgagccactgcgcccggctgcagagggtttttaaaggctgggcttctggggatctttaaagtgaattaagggctggggaatttctggaactttcttacctattttctggcttcagtctgtctgaggtcttacatgacagcaattagttggcatttttcacctggtgggggggtgggtgtcctggtttctgaaaaacaacttagggatatatgtcaaggtgttatgtgtagtttctatagggaaccaggcatctcgtgactctgacttgggtgactgttgtttattatcttcttgtttagcaagttatttaattccctaattgctggttgtagggctagctaagatgcctgggatttttcttgagatgactcaaaatttttatttctatgcttgagcgggggcaccggcaggccctgaaaagggatccctattccatctcaatctggcttcagccaaagacagacaccaactcaggccttatatccattctaggtcgggcccctcggggccgcgtggccaatcagatcccccctgagatcctgaagaaccctcagctgcaggcagcaatccgggtcctgccttccaactacaactttgagatccccaagaccatctggaggatccaacaagcccaggccaagaagggtgagcctgtgatcattgagctggggttggggtggagaggttgcctggcccagatgggacagtgtcccccttgcagccccttcctagccctccacctctcatgtctctgctcgtcttgcagtggccttgcaaatgccggaaggcctcctcctctttgcctgtaccattgtggatatcttggaaaggtgaggcttggggcactggagaggagggtgagccaggcttcccccaccccctatgctcattacccgggtgggtaaagccctggtggcgggcattttttccttctgaacctccaccttccccctttccctcccacaaccatacacacactcagggaaaacccaaaacaaatctcccagcttgctgagagccctgcttgtccctgcaaatcccccctcccctaaacatttgggacagagaaagaaatcaatcccagtgtcttcaaagctagacccagagcaggtggtaggacctggggaggaccctaagaattctccaagctgcccctgaaatgcgctgagtgatcagtgggaggtctgccggtcgggggcggtggggggcacctgttcctcgggcacatttggggaagtagggcaaggatgggtttggagtgggaggtgcctgggagaaggtattcagttcctctacatcctacccctgtcactctaagtttctgcaatacaatgagccatccttggtggggagggtgagagctcagccatctggaaccagcacaggaacaggggaggggaacgaagaaaggggaggtcatctcatgctgggaacctcccactcccctgctgccccatcgccctcccctgctcctccctccccctccccttctcccccatccccctcccctgctcccccatcccctgctgccccatccccctcccctgctgccaccctccctcccctgctcccccaaacctctcttctccccccttcccctcccctgctccccctctctcccctccccttccccctcccctgctccccctcccctcccctgctccccatccccctccccagtttccccatcccctcccctgctgccccattcccctcccctactcccccttccccctcccctgctcccccctcccctgctgccccctcccctcctcccccactcccctgctgccccatccccctcccctgctgctgccccatccccctcccctgctgctgccctccctcccctgctgccccatcttgttgccacagactcacttccctgctcccaccgtcttgccccttggggatgctctctggggctcaggccaatttgcatacattttaatctataaaaaattaagtgctgtggctgacttagacgcctgggctgcattctaaggaggtgaataatctgcttctgggcacagcctgatttggggaagggggtggaggagggggtgactagcaggagctcaactcttccactgccacacccccaggggaaggatggggggaccccagtcactgagccaggctccacgccccaagtgtgagtctctttcaaggaagagggggttctcctccattcctagggtgagttcaggggtacaaggtcttccccacccaccccctcccccagtgattcaggcctggcagcagttcccacggcagtgttctggccagagcctcctcttcctgatgcaggaggcgtgtaggtggtgccatgtgctatgggggagctgtgcctgggtccccccatcctgggcaccaagggccctgcctgcggtggggaggtagtgggggtccggacgagagggccctgcctgtggtggggaggtagtgggggtccgggtgagggggccctgcctgtggtggggagggggtgggggccctgcctgtggtggggagggagtgggggtcccggcaagagggaggctgtgtgtattcatacagccacgcccatgcccaccacagcactcagcgcgggagtgaggacctttgggtgtgtgtgcgtgctcacggctctgggtgggtgagtcagggcatggggcgtctgtgttttgaccccacgtgtgccggagtgagggttggggtccctcctgcagcctgagcctgggtagaggaatgagggtcctcacgcagcaacagttccaggagcggctgccaggctggggcaggcggcagctgtgcccctcctaatctttgttggcagaagtggcagctgccatcccgaggaactgggagaggtagggagagaggagctgggccctgagacaccctcccagggttgggtctctcctacctcagtccctgtgtccctgtcccaccgttccccgcccctgtgcccgcaggttcacggaggccgaagtgatggtgatgggtgacgtgacctacggggcttgctgtgtggatgacttcacagcgagggccctgggagctgacttcttggtgcactacggccacagttgcctgagtatggtggggccaggacacctggacggtggcggggctggcagggaggcaggctgcacattcatcttccccatggcagtgccttcttgtcctgcttggagacacaaggtccctcctggtttctggggtggcctctgccttcccgctctgcaggtagatctttcctttggatttggttgccttggcaacggtgctctgtcccagatgcaggtgtttgaaaggctgttggttgtagagcaggctgggccccggccgggtgacagagaagtctgattgagaaggagcttctaggggatctgtgacccccctcttctcctaccctgtccttttacccccaggctgaagccactgcgcctggctgctcagagacctgagcctggccgggccctctgctgctcctgccttcccaaacagcccctgaactcctccctcccacagttcccatggacacctcggcccaagacttccgggtgctgtacgtctttgtggacatccggatagacactacacacctcctggactctctccgcctcacctttcccccagccactgcccttgccctggtcagcaccattcagtttgtgtcgaccttgcaggtgggtggaacgaggatcctcggcctcctgcagggtggacagcggccactctccagctgttgcgggatccccaggtgctccaggctgtttctcagccctggctctcctgccccagccgctggcttcacttccctcgtcattcctacaggcagccgcccaggagctgaaagccgagtatcgtgtgagtgtcccacagtgcaagcccctgtcccctggagagatcctgggctgcacatccccccgactgtccaaagaggtggaggccgttgtgtaagttaaaaatgggggccaagtaagtcctagagacatgcgtgtaccctgggagggagcctgaggttcatcatccaggaaagaaaccaaatctaatgctccttacctgtgagcccgaggtcacactgcaaggtagggaccaaacagggagcagacctcaggtttactgtcgctttctccactgcccagtccatcatccagaaggctgtgcagggtgggggcaggaatcagagggcctgatgggggttgagggtgggctggaaatggtgggaatataattggagaagatggatgggcacgcccaggctgcagccccattaatttaccatccggacagctaacaagcagaagcagcgtgtctcctgccgcctaattattttaggtaatggaaatgcttaatgttgtgtgaatgcagccagcctgagagccgacggctcccccgactgggactagggaagggagtcccgttccgtactaatggcagggagggagggtcgctccctgactcagtcccacctctggggctttggaggctgtttccacaggcctgacacccctgtccctagacaggcccacatcagggccttccccagcccagatctggcagccctgctccccgagcagcactgagtggcattccccctgtgcccacgtcactcagtctctacccttggggtcttcaaagtgtatgttggagggagggacaccctgagtgttagccattcatcagaatgaagtgtggtctccaagagggagagaaggagctgccacaggcaggttatcttccacgctctgtaatcttcatgggctgggaagctactgtcagggacagcatgtctgggggcacacttggtacagcctgggttgagcctcagacacactgcttcctagctgtttaatactaggcgagtttcttaacatccctgagcctcagttgttaccttctgtaaaacaggtatactatacgtatctgggaggattaggagataggactgcgtgaactaattcacagcaggtacttagtctatgcctggtacacagaaggcacaagtccaataaacagtagctgttggccgggcacagtggctcacgcctgtaatctcaacactttgggaggccaaggcaggagaattgcatatgtccaggagtttgagaccagcttggggaatataatgaaaccctgttctctccaaaaaaaaaaaaaaaaaaaaaaaaaagaattagctgggtacagtgtccatgcctgtagtcccagctcctcaggaggcttaggtgagaggatcgcttgagcctgggaggttgaggctgcagcgagccatgaccgagtcactcaacctgggtgacagagtaagaccctgcctcaaaaaaacaaaatgaaaatccggtagcttttgttataactcagtaactggccccaagagctagtttgggcagaaagtagccattgtatgccctgcaacctcatgtacagcatagatcagaggtccccaacccctggtcccatgtcctgttaggaaacctgccgcacagtagaaggtgaggggtgggccagccagcgtgaccacctgagctccgcctcctgtcagatccgccgcggcattagattcttgtaggagctcaaaccctatcgtgacctgtacatgcgagggatctaggttgcatgatctttatgagatcctaatgcctgatgatctgaggtgagacagtttcatcctgaaaccatcccccaatcccacccgtgtcttccacaaaacctgttcccagtgccaaaaatattggttactgctggcgtagatgactccttgaacactactgtccacatctgtattgagcttgtgaaggagaatctgttccccaacttccaaatgaggatctctagaaccccaggtggcctcaccacggccggctgctccttcactcttcctcagaagcttggggtgggacggttcttagattctgcattatgtaaatagagggaccgtagagtcatccaattcaaactccttatttcacacgtgagaaaaccaaggctccaagaggtgaagtgaaggcttgtcccagtttacacagaggcacagcacagccagctgtgaactcagtcctctggacttttttttttttttgagacagagtcttgttctgtcgcccaggctggagtgcagaggtgcgatctcggctcactgcagcctctgcctcccgggttcaagtgattatcctgcttcagcctccccagtagctgggactacaggtgcccgccaccacgcccagctaagtttttgtatttttagtagagacagggtttcaccgtgttagccaggatggtcttgatctcctgacctcgtgatccacccgcctcggcctcccaaagtgttgggattacaggcatgagccactgcacctggcagccctgtggacttctttttttttttttttctttttgagacggagtctcactctgtcacccaggctggagtgcagtggcgcgatctcagctcactgcaagctacgcctcccgggttcacgccattctcctgcctcagcctcccgagtagctgggactacaggcgcccgtcaccacacccagctaagtttttgtatttttagtagagacggggtttcactgtgttagccaggatggtctcgatctcctgacctcatgatccgcccgcctcggtctcccaaagtgctgggattacaggcgtgagccaccgcgcccggccagccctgtggacttctaagccagcgagtgcctcttctgctgccctaaaccacacttagcctcctttccacccctgcaggtatcttggagatggccgcttccatctggagtctgtcatgattgccaaccccaatgtccccgcttaccggtatgggctgggccgggctgggctgaccagctggtgaggggtgagattccctgccactgaggtcctcaattggttgcatccccatttcctggccactaagccaccagccctaagggtctgaggcacttgggccctggatctgggcattagccccagggctgctgttgcctacccgtctcctggggtttacacggagatcttaaagccgcccactcttgtctgctccagctgtgggacaggtcttcctaatgacagtccccgctcttgcctctgttcttaattacctgcgtggggcctaaaggttcaggagcccacggggctgagtcaggagctgtgtgcataatactggtcctgacagtggctgccacagtgaccctgactgcttcttttccaggtatgacccatatagcaaagtcctatccagagaacactatgaccaccagcgcatgcaggctgctcgccaagaagccatagccactgcccgctcagctaagtcctggggccttattctgggcactttgggccgccagggcagtcctaagatcctggaggtcagtgggctcaggacagcctctggaggagggaagtgactgggaacacagctgggaaaaccagtaggccacaggttcagctttggctgcttgaccaggtgacccccaccctgcctccctctcccaacagcacctggaatctcgactccgagccttgggcctttcctttgtgaggctgctgctctctgagatcttccccagcaagcttagcctacttcctgaggtggatgtgtgagtatctgcctggctatgactggctaaagaagcttagaagctgggtcttgcccagctcgtcttgaaggctggagccaacaggaattgcttccatggtcatggaattttactgtttacagagacctccctgggagggctaactgggtcatacctgctttgggactttggggctcagaggcaatggcaacatcacatttgtccttgtgagatgagtttgagcggtggctgacacctgccctgtaccaggtactaaatgtggttctggggatactatcaccagtgagctgccctggaaagctcattgtcggcagaggaaacaggagaaaacacgcaacaatacagtattccaaacagcagtgggtcactgtctttactttaggattcataaagcctgttaatgaatgggtgtgctgggggcactgtcatgttcttcagcatgctgcctgggcgacgaggaggcccttcctagggtctgacctggcttcccttcccaggtgggtgcaggtggcatgtccacgtctctccattgactggggcacagccttccccaagccgctgctgacaccctatgaggtaacaccaagctctgggagagagtgggctttggacgtggttctcaaaggtgaggtctggagtggagtggggtgggtgggcagcacttcgttatgttcgtagattccggagtctgtctcgatttctccagcggagtcacttcctagctgtgtagccttaggcaaggccctgaaccacacagttcccttctgtggcaggggacagtgtgcccttcacaggccgtcgtgaggactgaattcagtaatccaggggcagaaaaacactggcagatgttattgtccctccctcccctcccctaggcggccgtggctctgagggacatttcctggcagcagccctacccgatggacttctacgctggcagctccttggggccctggacggtgaaccacggccaggaccgccgtccccacgccccgggccggcccgcgcgggggaaggtaggcgggggcttccaggagggaggagagaccgcgcctgggcactggccgccgccctgcgaccgcgacgggaaacgcacaggagcggagcggagggaaacgcagggtcgcaggagcgagaccctaaccaaagtctgcgacctcaggtgcaggaggggtccgcgcgtcccccttcggccgtggcttgcgaggactgcagctgcagggacgagaaggtggcgccgctggctccttgacgcgctcccgggcctcaggtatcagcccccgctctgggtgcgccccgccttttgccgttgtcatgggaacgccttggcgctccgaggcccgccctcggggcggtgctgacgttcggttccgccccgtgcattgtgcttccgctcggggaaagaccgcttccggtgcttccgtcgctccttgccgggcataatggccgcgcagcgacccctgcgggtcctgtgcctggcgggcttccggcagagcgagcggggcttccgtgagaagaccggggcgctgaggaaggcgctgcggggtcgcgccgagctcgtgtgcctcagcggcccgcacccggtccccgaccccccgggccccgagggcgccagatcagacttcggtgagacaagccccgctccggaaacgcactcagtttcctccatcttgtttcgtccccctcgacacccttcagcatcccccaccctgcgtccacccgcattcctcccacccagtccacacccttcatttctcgcgacccataccctctttgctcaaactgcagcctgtcctcccaggcttccgccttcaccgtcttcctccgctgtctcctgttcaggccaatccactcatttcccccctctcatttcccccagacttttgcctcgattccctttttctctctgtcatctcgaaccctcctgccctttctcatttctttccttcctggagcctcccatgccctaatcccatcctttttcctcatatcgctgtagggtcctgccctccggaggagcagcctcgaggctggtggttttcagagcaggaggccgacgttttctccgcattggaagagcccgccgtctgcaggggcctggaggaatcactggggatggtggcacaggcactgaacaggctggggccttttgacggccttcttggtttcagccaaggggctgcgctagcagcccttgtgtgtgccctgggccaggcaggcgatccccgcttccccttgccacggtttatcctcttggtgtctggtttctgtccccggggcattgggttcaaggaatccatcctgcaaaggcccttgtcattgccttcgctccatgtttttggggacactgacaaagtcatcccctctcaggagagtgtgcaactggccagccaatttcccggagccatcaccctcacccactctggtggccacttcattccagcagctgcaccccagcgtcaggcctacctcaagttcttggaccagtttgcagagtgaaagatcaagaaatgtctctgctcctacatccagctcctctaggggcagcctccgtcatccatgccctcccaggaccctccactcactgctgtgagtgcgcctcaccagaaccagttaagagacaactatcaattcttgagacccaaattataagggccctgccctgtactgaagaaaaggggagcacaaggccttaatggacattgacttgtgaaaacgcaaacatgaatatggttggagagccctggattaggagggtgacatggggaaggcagaggctggcaccatggtgactgccacataataaagtggtgatttggattttgagcatctttttcctggtacacacagaaaaacattttataatggaagtcggtttcttggccatctacatagttttctgggcagcgccaagcagggaggtgtctccagttgtgagtcctcggacaggctgctgcatgggtgcacatactcacgttattggtggaagttttaagtcccaaactgaagggaaggaggcctaggtggcacaatcagggaggaatatacatctgagaagttttgggaagacatcacctggcaaggctgcctgaaccacagtaatttagtcttcctctatccagatcactgagagttgtgtgctggtcttctctcaaaccctggatgtgttacctgcttctccctaagtgctctaacctcgctgaactatgagcctgaagggtgggtcgatgccagaccttaggtggaggccaaagacagtacagaataaacagcttcttcctaaattgaccccatcttgagggtttctgagattgatgccattctttagtgactacagccaaggcctaagcaatccagctggttttccccttggggcgtgtagttgttcttggatactttgaggattgctcactctttttttttttttttttgagacaggctcactctgtcacccaggctggagagcagtggccaagatcctggctcactgcaacctcagcctcctgggttcaagcagttctgtctcagcctcctgagtaggtggcgttacaggcatgcgccaccacgcctggctaatttctatatttttttgtagagatagggttttgccacgttgcccaggctggtctcaaaactctttagctcaaacaatccacctgcctcagcctcccaaagtgctaggattataggcctgagccactgcacctacctaggattgcccactctttttttgttttctttacttttaaagacaaggtctgactctatcacccaggctggagtgcagtggcacaatcttgacagcctccacctcccgggctcaagccatccatcctcccacctcagcctcccaagcagctggggctgcaggcgcaaatcaccatgcctggctaatttttgtatttgttgtagagaaggggtctcaccatgttgtgcggatggtctccaacttgcgagctcaagcaatccacctgtcctggcctcccaaagtgctggaattaacaggcgtgagccacctcacctggccaattgcccactcttaatgagttccctcccatttccagtgccacctgacaccccccaccccctgacacacacacacacactcttgttttctgacttcctgcctctgcaagacaagaagcctgttctttttctggaagatcacaccaactcctgtttagccctcagacatagttgccagggagctaagcaactgagcaggaattatggtcagggacacagcacaaatactccagcccatttttctgacaaccagactaatatcccttacattaccgaaagttctgggttcctcactacagagattagctgtccaaaattaaaaaaaacaaaacaaaacagaattatccgcccagagacctagttactgggtgtggaaagtgtgtgtggggaggggtgggaggtggttctcccttgcttcagttggcttctgccttgttttaaggaatcttctcctttagcaaaaggaggagactttggaatggattgattacacagactgtggtatctgacccattgaattttagaaaaaattctgatttaaagtttcagaaattgcacagaaaatttcagatttctggcttctctggaaatgatagatttgcagttcagggctcccataccctcatggtaatcataggctgccccctttagcacggtcccaagaggtgaaaacgacttgtacaccccagctgcttgggattattgaggacgaaagtagagagaaggggagaaatattggggagtgaattttgagccaaggcttaaaattaaaagtgggggaggtagagcccagcagtagtaggtggaggagaagggctcctggccgggggtgaggattcctcctgagaaccatagtgtccaagctagagggaaacatggggtccactagttctcgacaagtggaacaggtcacttcccatcatgccgtccaggagcaagagagactcttagggggttgtgcccctccccacccccaatacgcagattctgtgtaccatttacatccagaacattggttaaaacctgaattctggccctgcgtggtggctcatgcctgtaatcccagcactttgggaggcggaggcgggcagatcacctgaggttgggaatttgaggccagccagaccaacagagagaaactctgtctctactaaaaatacaaaattagccaaccatggtggcgcatgcctgtaatcccagctacttggaaggctgaagcaggagaattgcttgaacctgggaggcaaaggttgcggtaagccgagatcacgctattgcactccaacctgggcaacgagagcgaaactgtctcaaaaaaaaaaaaaaaaaaaagtagctgggcgtggtggcatgcacctgtaatcctagctacttggtaggctgaggcaggagaattgcttgaacccaggaggcggaggttgcagtgagccgaaattgtgccactgcactccagcctgggtgacagagtgagactccatctcaaaaaaccaacttgaattctggggccaactccagatgtactgagtcagaatcactgggacccaggaatctgcattttggcaaattgcccccatcattcccaagcagggatttgaaaagccactgccttaggggttgaatgaaagcctcgggtgagggtgtgttatctgaaaaacccctagtgtgactctcttgcaacccaccagggaggggagcaagctccccagaacaatcactgcttaaacattttcaatttatagcaaaggaaaattaggtctgaaggatagaaataggaatagcatttatttatttacttacttatttgagacggagtctcgctctgtcacccaggctggagtgcagtggtacagtctccgctctctgcgacctccgcctcctgagttcgagcgatccgcctgcctcagcctccagagtagctgggattacaggtgtgcatcaccactcccagctaatttttgcattttcagtagagacagggtttcgccatgttggccaggctggtcttgaactcctgatctcaagtgattcgcccacctcagcctcccaaagtgttgggattacaggtgtgagccactgcacccggccagaagagcatttattgagtaataactgtataccagacattgtaataagcaagagctttaatgcggcctaatttagggccaggtgcgattgctcatgcctataatcccagcactttgggaggctaaggcatgaggatcaattgagcccaggagttcagaaccagcctgggaaacatagtgagaccccctctctacaaataatttaaaagttagctgggtgtggtggcatgcacctgtggtcccagctactcgggaggctcaggtgggaggatcacttgagcccaggagttttgaggctgcagtaagctgtgattgtgccactgtattccagcctgggagacagagctagaccctgtctccaaaaaaaaagaaaaaaaaacaaactacaaaaattggctgggggtggtggcacacacctgtagtcctaactactcaggaggctgagacaggagaattgcttgaacctgggaggcggacgttgcagtgagccgagatcatgctactgcacttcagcctgggcaacagagcaagactccatctcagaagaaaaaaacaaataaaattatatatatataacacatatatattttatatatattaggcaataaatatatatagcttaaaccttacaacttcatgtttaatctcacaacttcatgaggtaggtaccattattattattattatttgagacggagtgtcactcagccacccaggctggagttcagtggcacgatcacggctcactgcacctccgtctcctgggttcaagtgattctagtgcctcagcctcccaagcagctggaattactggcaagcaccaccatggctggctaattttttgtgttattagtagagacggagtctgaccatattggccaggctggattattattaagacagggtctacctctgtcaccaggtgcaggatcatggctcactgcagcctcgacctcttcggctcaagtgaccctcccgcttcagcctcctgagtagcttagctgagactacaggtgccacctatcacactggcttttttttttttaagacatggggtctcactatgttgcccaggctggtctcgaatttctgggctcaagcagtcctccagcctctgccccgccccgcaaaatggtgtgattacaggcatgagccatgtctcccagccctaaataatgattttttttttttgagacagggtctcactctgtcatccaggctggagtacagtggtgcaatcacagctcactgcagcctcaacctcccagcctcaagcaatcctcccacctcaacttcccaagtagctgggactacaggtgtgcacaactaattttctttcttttctttcctttcttctttcctttctttcttttttgtagagatgggagtcgcattgtattgcccaggctggtctcgaactcctgggctcaagagatcctcccacctatgcctcccaaagtgctgggattacaggcgtgagccactgtgccctgccctaaatgatttctaagatgctaaacaaccctgacgtacggtcaatcctctggttctttcccctctgaccacattctgacctcttctcagaatatcccaaccatttctgttttccacctctgattccaccttggattcctagagctcttaggagagagaacccccttagcaaggaacctctcaacagccccaggcccagagtgaacccgggaggcggaggttgcagtgagccgagatagtgccactgcactccagcctgggcgacagagcgagactgtctcagaagaaaaaaaataaaagtatatgtatgtataacatatatataatatagattatatatatattagacaataaatatatatagcctaaagctcaaggtgtaccccccacatcccgttcattctgcctaagtgcacagagctggggtcccctcccaacaccaccccttcacaaacatgtagtagcctaacagaatacttaagatcaaaataacattctgctgtttttggatttttacttacatgatcctatttaatcctcacagtgcacctgccgaggagaagagattattatcccgttttacagaaagctcagaaacagaatatggccccttaaccaccagttgctgataatgccaggttggacctctggcttcccagagcactacacccagcagtccactgcagtccacccactgacatcccctggaacccagaagcaagtgcgttttaatctgcaagacctcggggccctggggaggtgggatggctagcatgtgggtgttgattaactgggaaaccggcacgagtgtcttagaagtacttcacaaaggagccgggtggggagtgaaggagggggtggggcgtgagacgttaagaaaaattggattaacgtgtcgtgggctgggttgcattaaccattcccaacactatctctggggaagtctcacacctgatattcaatagacatcccctgtagtgggtgatgttggcagaggcaggcgacatatacaataatatttttagagatccttgttcacacttcatccgcaccagaggacttcagcccctgtggtattcactcctctttagggctaatttgagaaactgtctcagattggaatccagcacctagagataggctgaggtgagcaggctgatctgttcagacgcttcgcggaccaggttaactttacaagctcattggcttccagagggttggggacccttcttatcctcctagctcagagggaaagattcaagagtttactcttcgcccaatgcccacttcagctaggggttcctggaagaacggggctgtggagtatctcagaaaactttcctccctctactgtcttcaggccccaggagacaaacctccttccaagcctcctggtcccagtggcttccctctcaccgaaatcgaaagaacccgagtcccagcccgaccccttctctcgccgagccctggctgggataccttggccgggaggacaggacggcctcaggctggccgccagacgcactccgcaggacgcgcgcgctcgagcctcggtggactcagccgccggccccgggaggccgcctccctgcgcagcacctcctgccacccgcgcgggcacgtgggatcttgactcgccgcccccgcctccttctgctccgcgtccccagcccgcggctcggggcgcggcgtggcgcggcgcgtgggcgtgctgcggggcgaccatggctgtagactgttacctccagttcccacagtaacaatcgaaagccacggttgccctggagacgcgggggcggggcgcgcggacggcgccggcgcggggcgggctgacgtcagggccgcgggggggcgggcggggcggcgggggctgaggagcgcgcgtgggccaccgcccctcgcagcccctagggacccggacggggcggcccgatggcggcgcctgcgttgatcagcaccgcggacagcggcggcgcaggcagcgggccgggggcggggccctgagggacggggactgggggtccccgggcgcggcggcggcggccggggccgcggtcctggggcggggccaggcgtcggtggccgtgactggagactgttactgagggcggcccgggcagtaagcagtctagagccaaggtgccggcgcgctgtccgggcggggtgccccggtcgccccggctgccccggctgggggctctgctgctccgcctcccctgcgtctcccgccctgccccgcccggcgctcgcgaccaggcacgcggcccctgacgtcagagggccgtgacgtcaaagatgtcccagagggggcacttccggcgggggcgtgggggcggggcgggacctgggaggccccgcccccccggtcctgagaggacagctccgctcgcagaggcgggaagccgtgggcgccgcgggacccgctggacgggacctgccgggaaggggcgcccgacgccatgcggggcgggggtcccaggagggccggggaagcgggggtgggcgtccgtctctcgcctgcacccccgctcagccggcccgggcagcgaggctgagtcaccgcgccgcagggagggagaggagggggcgcgtctcctggggcgccagcaccttcgcctcactttcctgggagaatggcgcaggagccccaagaaagccgggggggggtctccgaggtcggtcctccactcgatgctcctccgaagtagctgcgtgtccatcgggcgccggcaggtgctgcgcgggctcgtgtcgtctctggccccggctccgcagccgcgaggggaccccggtgccccccgtccgcccccatccccaccccggaggggccgccccacccgccgcctgcccgtcccctcctcgtcctcccgtccgtgtccgcacatctgtccctccgcggctggtccgtcccgcttacctggcgggccgcgtcgccactgcccggtcgcctcccgcagcctggccggcgcggcggcttttataggcgcgcgtagtactcgtgcggcggctcattcatgcggccgcggctcctacacactgacgcgctgccgacgtcagcggggaatttaggaaatgggaaaaggggctatttatagtggcgaggcggggggtggggaccgaggcgaccgggaggggaggagggggcgcggaagcggcggcggggtagggggagccgcgcccctgcccagccgacaaggggttaactttccggaaccgcgggcctggggccggggaggcggcgcggaggggcgcggcgggcccttcgagcttattcacgctctccttccggagccccgcggctcctgggggtcttcacgtggcagccccttccccctcctcagttcctggacctgacgtttctgccgtcacaccccgcaaggccactgcggtgtcgccaccctctcgtcctgcagggtgggcaggagaggaagctggactcccgtgggggcctggggcgcagcgagggctgtggcgtcgggggccgggagaagaagagtaggggagcccaaagtagcccaggagtctttagcggaggaacctgggcctgggagggaaggcccagcggggattcaggtaccacccaggagctggagacccgagggacggcagagaagttggggaaggtgggccaacctccccagaaatgatgagcaacgggatcctctatgagggagctgggggaacgcgccagaggtaggggtgagaggaatgggcagcctcagcaagggagagaggaaaggctgtcagtgccacgctccagagcctggcatccaggacccaccttcggaccatttgtggcacgatggacgctcccagagctcacgttagggtaatagagagtgaaggagaccagcagcttggccaagaggggcccccaggggatgaggaggacggtttcctggagaagttaatgttcccggagaccagaattggcagggagagcccatgacttgtggggcagttcccctggttgggagcggggaaatgcatggtcctggcccagcctggctccatcgagatggaggaagggtctaaatgagaggagtgtgttcagacgaggagctggaccaggatggggagggctgtgcaaggcatggccggaagagcggggcagggagagaaaggtcgaagagtgaagtgcacaggagggcaaggcggtcctcaccctgcctgggctggggcagggctgtgagaccctcccttacagaagcaatgagggcttgaggagggggttaggggcctgggctggggcagggctgtgagaccctcccttacagaagcaatgagggcttgaggagggggttaggggcctgggctggggcagggctgtgagaccctcccttacagaagcaatgagggcttgaggatggggttaggggcctgggctggggcagggctgtgagaccctcccttacagaagcaatgagggcttgaggagggggttaggggcctgggctggggcagggctgtgagaccctcccttacagaagcaatgagggcttgaggagggggttaggggcctgggctggggcagggctgtgagaccctcccttacagaagcaatgagggcttgaggagggggttaggggcctgggctggggcagggctgtgagaccctcccttacagaagcaatgagggcttgaggatggggttaggggcctgggctggggcagggctgtgagaccctcccttacagaagcaatgagggcttgaggatggggttaggggcctgggctggggcagggctgtgagaccctcccttacagaagcaatgagggcttgaggatggggttaggggcctgggctggggcagggctgtgagaccctcccttacagaagcaatgagggcttgaggatggggttaggggcagtaagttaacttggggagcggatgtgggggaacgctgaagaataaagactgtgggcacagcagacccctggggcaggttagcaatgcacagactccactgcacaagatacatggggcggaggggctctttggaagtcgggggtgggggatctgactctatcaaaaagagaaaagataaaagagatggggtcagagaggccctgcatagtctggatttggcctactagagctccagttttcttgccgctagcctttgttccagggattctgttattcacaaatgccttcctgctcggtagaagaactcctattcatccgtcaaagcccagctctaggagcacttatgaggagcctctccacctcccctcaacactccgtaacttccacctcaggccgcagcacgtccctcgggcgagatgtcggggtccgccttccctagagaccggcagctccggaggcctccgttttcctctttgggacctcactgcttctaaagtgaggatgctatggggagacatgggagagggagtgggtaagatggatccagaacatggggcggactcaggcagcggcgggaatcaggcggactcgtttggaccgaagcctccgccaggcaccgaagccgtgaagtcgcctgcgcagcaaagggagcctccggggggcgcccgagaccttggtgtcgctcgggggccgctggtagccgcgcccgctgcccctcgcccggtgactcagccggtacctctggcggggccatgggggccagaggacagcgcggggggcggcgagcgcggttgctaagctctccaaggcctcggagggacaggatctgggcgcacctcaccggttgccatggtaacgcagcgccccagcccctcgcgctccgcggtggagggaggcgcagccaatcggaagcggcggagttctcggggaccccccccccccccgctccacgccgtgtgtgggcgggggtcaggaggtgcggggcggaggcggagcgtgggccgcggagatccggcgttcgcaggaggcttggtgcgcggcggggctgcacggggccacttccggagtagtactgcgagcagcggcgcgacagtgcggggtcccctttctcccagaagagacgtcacccacacaaacctgaccttcacgtggggcgcgggaccttgcggggtcccagccgcaggcgcccctgttgtttccttcgggcgggtgggttggagaagaagtccacgcgggattcttcaaaacggcgtacagggggattctagggccccatggttacttctttggaccccccggaggcgctgtccagccacttccagtcgccctgatgactcgtcgtgggttcctttaggagacccgaaagttcagggcgggctgtgtgggtaacacctctgcccaggttcccggagggccctacgtggctgcccctggagtatcccagagcgctagggctgcgggaaggggcgggtgtgcttctggaaacatgagcgcctgttagtatcagtgcctggatagggctggggacaaatcagtttatgccgcgcacaccgaatccatgcgcctgagtgagggtgggtgtgttggggagtgcgtccaagtggacagtgccgtacagtaatgtctacggggagttccaggagagctcggctactcctgcgcaggataacctctcccccaccacccgagtcccgtgctcgcgggcaggacttttccgaactggggctgtgtgcctagaaatacgtacatgggagcgctcagctcaaagccccagggtttctgggactcgcgtgtccggggtcggggtcccaggtgggtacaggtgggagggcgaacctgcgggtagggtgggcccctccccgcgggctcagcatctgtgcgcctccagctcaggtgcgcgggaggaaggcagcggcctgccgcgcagagccctgcgcgcccgcgaggtggcgccatagccgcagcagcgcccgccggcccgggccgctccagataagagtgtgcggaaagcgcggcggggctgagacgcgaccaggacgcggggaggacggaccagcaggacagaccgaccgggggcccggcgggcggagggcagcgcagccacgtcccccctggatccgccgtcagccgggcccggggctttcgacatgccccccaggtgggtcctcgagccggggaccgggagggacgggggacccgggacagcccggtcctcgtgcgtcggccgcctcgggtgcatcttctggcgcgggtgccccatcgcggctggcggctggcgttcagggctccgggtgtcgtccctttcggactcaggaccaccgggccgcggctccgcgccgggttcacggcggggtcagcggcccggggccggctctgcccgcacatgggctggagaggcgaggggaagggaagggaaggggagctggcgggcggggctggcaggggcgctgccctggcacagctcggggcctggcagcggcgggtggggcatcggctaagagctgccaccgccgcggggaggggagcccggcccgccgggaccgcaggtaacgggccgcggggccccgcgggccaggaggggaacggggtcgggcgggcgagcagcgggcaggggagctcagggctcggctccgggctctgccgccggatttgggggccgcgaggaagagctgcgagccgagggcctggggccggcgcactcctcccgccctgtctgcagttggaaaacttttccccaagtttggggcggcggagttccgggggagaaggggccgggggagccgcggagggaggcgccgggcccgcgcgtgtagggcccaggccgaggccgggacgcgggtggggcgcaggcccgggtcagggccgcagccggctgtgcgccgtgcccgcccggggcgctgccccctccctcccctgggagctgcgtggctcccccctcccccccacctgcttcctgcctcagcctcctgccccgatataacgccctccccgcgccgggcccggccttcgcgctctgcccgccacggcagccgctgcctccgctccccgcgcggccgccgcccgggccccgaccgagggttgacagcccccggccagggcggcgccagggcgggcaccgcgctcccctcctccgtatcacttcccccaactggggcaacttctcccgaggcgggaggcgctggttcctcggctccctttctccctacttgggtaaagttctccgccctgaatgacttttcctgaagcggacattttacttaaatcgggtaactgtctccaaaagggtcactgcgcctgaacagttttcttctcggaagccccagcacccagccaggtgccctggggcgtgcaggccgccctggcctcccctccaccggcggccgctcacctcctgctccttctcctggtccgggcgggccggcctgggctcccactccagagggcagccggtccttcgccggtgcccaggccgcagggctgatgcccccgctcagctgagggaaggggaagtggaggggagaagtgccgggctggggccaggcggccagggcgccgcacggctctcacccggccggtgtgtgtccccgcaggagagtgtgctgggcagacgatgctggacacgatggaggcgcccggccactccaggcagctgctgctgcagctcaacaaccagcgcaccaagggcttcttgtgcgacgtgatcatcgtggtgcagaacgccctcttccgcgcgcacaagaacgtgctggcggccagcagcgcctacctcaagtccctggtggtgcatgacaacctgctcaacctggaccatgacatggtgagcccggccgtgttccgcctggtgctggacttcatctacaccggccgcctggctgacggcgcagaggcggctgcggccgcggccgtggccccgggggctgagccgagcctgggcgccgtgctggccgccgccagctacctgcagatccccgacctcgtggcgctgtgcaagaaacgcctcaagcgccacggcaagtactgccacctgcggggcggcggcggcggcggcggcggctacgcgccctatggtcggccgggccggggcctgcgggccgccacgccggtcatccaggcctgctacccgtccccagtcgggcctccgccgccgcctgccgcggagccgccctcgggcccagaggccgcggtcaacacgcactgcgccgagctgtacgcgtcgggacccggcccggccgccgcactctgtgcctcggagcgccgctgctcccctctttgtggcctggacctgtccaagaagagcccgccgggctccgcggcgccagagcggccgctggctgagcgcgagctgcccccgcgcccggacagccctcccagcgccggccccgccgcctacaaggagccgcctctcgccctgccgtcgctgccgccgctgcccttccagaagctggaggaggccgcaccgccttccgacccatttcgcggcggcagcggcagcccgggacccgagccccccggccgccccgacgggcctagtctcctctatcgctggatgaagcacgagccgggcctgggtagctatggcgacgagctgggccgggagcgcggctcccccagcgagcgctgcgaagagcgtggtggggacgcggccgtctcgcccggggggcccccgctcggcctggcgccgccgccgcgctaccctggcagcctggacgggcccggcgcgggcggcgacggcgacgactacaagagcagcagcgaggagaccggtagcagcgaggaccccagcccgcctggcggccacctcgagggctacccatgcccgcacctggcctatggcgagcccgagagcttcggtgacaacctgtacgtgtgcattccgtgcggcaagggcttccccagctctgagcagctgaacgcgcacgtggaggctcacgtggaggaggaggaagcgctgtacggcagggccgaggcggccgaagtggccgctggggccgccggcctagggcccccttttggaggcggcggggacaaggtcgccggggctccgggtggcctgggagagctgctgcggccctaccgctgcgcgtcgtgcgacaagagctacaaggacccggccacgctgcggcagcacgagaagacgcactggctgacccggccctacccatgcaccatctgcgggaagaagttcacgcagcgtgggaccatgacgcgccacatgcgcagccacctgggcctcaagcccttcgcgtgcgacgcgtgcggcatgcggttcacgcgccagtaccgcctcacggagcacatgcgcatccactcgggcgagaagccctacgagtgccaggtgtgcggcggcaagttcgcacagcaacgcaacctcatcagccacatgaagatgcacgccgtggggggcgcggccggcgcggccggggcgctggcgggcttgggggggctccccggcgtccccggccccgacggcaagggcaagctcgacttccccgagggcgtctttgctgtggctcgcctcacggccgagcagctgagcctgaagcagcaggacaaggcggccgcggccgagctgctggcgcagaccacgcacttcctgcacgaccccaaggtggcgctggagagcctctacccgctggccaagttcacggccgagctgggcctcagccccgacaaggcggccgaggtgctgagccagggcgctcacctggcggccgggcccgacggccggaccatcgaccgtttctctcccacctagagcgcccctcgccagcccgctctgtcgctgctgcgcggccctggcccgcaccccagggagcggcgggggcggcgcgcagggcccactgtgcccgggacaaccgcagcgtcgccacagtggcggctccacctctcggcggcctcacctggcctcactgcttcgtgccttagctcgggggtcgggggagaaccccgggacgggggtgggatggggtaagggaaatttatatttttgatatcagctttgaccaaaggagaccccaggcccctcccgcctcttcctgtggttcgtcggccccctcccccggctccgcgctgctcttagagggggaggggtgtcactgtcggggcactcctagccctacctccggcccttgcgaccacacccattctcactgtgaatctccccgctggggtcggagcgtcgggcagagttggggagtggggaggggactgagccggccggagggccccccgcacccccgctcccacccaccccgggactgataatgtgaagttcctcattttgcacaagtggcactagccccagggccaacccttccttcctcagtcaccaagggcggggagttctggagtcggaaggcgaagagcctaccaccaggtctcccactcccgcggtgccctcccttcccttccctgcggccccggaccatatttattgcatgcgccccggcggccccccatcccgagcccaggctgggctgggctggaacgcggtctctttagctccctcctcttcgtttgtatatttcctaccttgtacacaggctcttccagagccgcttccattttctatactcgaaccaaacagcaataaagcagtaaccaaggaccccgaccccgctgctctcttctgcccctgcacaaggacctggatgggctgcgcccgctgggtggaggagccagaaagggccaccctcacacaggtgcagaggcttggacctgcctccctccccagtcccagaaacagatcagcaagaggtcaggtatgtttcataactaaaaatttattaaggaaacaaaaccagtgctgcaaacgggacagaaaggagagctgggtctccctcccgaccacccagtcatcggccttccagctggggagagaatcttaaaggagaggccggggaccctgtactccaaagagcccagtcttctgagactctaggggactcctacccccaaactactggccttggctcccctacacggtaccccatcgcttctggcatagtcctgggcctcagggagggcagagctgcgcacccatcctccaggcaggctgtgcagtcaggccatgggctctggggtatcccccactggtcccattaagatttgcccctggctccaccgaaaaccccgtcttcccctaagttgtccttgtctctggccctgggtttcaggaactcattcttggtaaggaagcctccccactgaggtaccagctaaaggggcaaggaaagggcccctgtgtcagtgtcagtttttccggggagtgagggcaaagctagaaaccaggttaggcgacggtgccccagcactggaatgcctcaggctgggctgtccacgcctggaagtttctcccagcacaggagccgagggtggaaggccctgggtgggagacctgtactaggttcctgccatgggtagtagagagggaaagttcagagtgagaacccctatgacgaggaaccgcggtgaagaaatgaaggggatcagggaggtgaaaaggatcaactagaaggggaagaagggtgaggggctattctggagggagggtaggcgggcaaggaggggtgaagggggagctgaggggagtcaggacatttcctgaagaggaagctagacggaaagaaaggccagtgaggagagagggagcaggtggaggccacccgagagcacgggcctgagaccagatgcccctttcctctagactcatgactgtccacggggacgcaactggcgaagtgtgagggacccaggttgataagggcaggaagaggagcagcaggaagggtgtgtggtaagtctggggtggatggtagaagaggtgggggcccagggctgctgttagggacatgctgtctagaagccgacttgggttcatgggcgagtccaggcctcagggagactggggacacacaccctgggcacttcttcctgacttaaccaaagcctcttgaacacattcacgacagaggttctgaagatgaaagggaactgtgatttcactgcatctgacggaaactcagaacccctgccctgtctccactggagaaagtggctgcgtccccaggcgagaaggccctccctcagccttggaatgagacgggggagggagaaaggctgagagcatgggcggcctatctggcttgcccagctgctgttgctgtagccagccacctccctgctaaatcctggcagcccaggagggtcccagcagcttccgcccgatccttgggaggggctctgtgaggagcaggtcccccacagcatggccgtggcgtgggttggaagaggatggtttattgtctgggtggattggtggctcaggcacgtgggcatcttccgtgctacactgggcgcctggtggcctttcaggaacggttccacggggggggggccccagtgtggctccctcagcccacctgggcccacgtgaggaaggctgggatgtcccgtacaggaacattccttgtgagcgccttcacacgcaggttccggtcatccgtcaacagcaccacctcccgcagtagccggattggctcctctgtgggcatgagagagcagaaggctgtcactgaggacaggaggcagagggctggctgctcttctcaccctggagaatgtggtcctggggagggggtgccacgctagccgtgtcttggctcttctaccagtcctttcctccgtccgggctctcagccccggggaccctcccctgctggcctagagagggctgcactgggcttctgccttgactccggcctcccatacaggactctcttctgcctagttcccaaaagctgcccaaacccgtcagcctcccaggaccctaaactgagggaatagaagcagccccttgacctctactcctttttaccacatggctggcccccagatcacaacaccgctctccccacaccccacttttttttttttaacaagtcctctccctctaaaagccagcaggttgaagctttacgcatccagaggcagaaaactaaagatggaacagaaaatgtatccagggttttccagatgtggggagaggggttaagggagccctgaggagaggagagggtaagggtcttggcagaattgtgccaagggcacaccaaggctttggccaaccggtcgcccctgctaagtaacagtaatccatgtatacaggcgaaagtctctaagaggacagaagagtaaaaaggaagagtagagttaagatgatgatcccagttctccgtcttgtaccccagggaagacctgtgtatccttccaggtttctttaggcacatttacaagtacatacacttggacatataacctttttttcctacagcatcatgatcatattagccacactttcagagtatatacttaaaaggtcttgctatagtggcacagatatctttcattctttttagatgactttttttttttttaagcacagtctctccactacctctctttccctaactccctaatctttaacacattggagagaatttaagccagggacaagcactcacacaagtgacatccctaccctgacaggcctgcttgggtggcaggtctactcgtcagtcccaggctgggcatttcctgacagaggtccaggtccggcagacagcaaggcacaggaagtgtcctgctgtgctcactgactgcgtgggctggcgggggtggggggctgcaaatatccatgtcggacctgagcagtctcaggcttgccagctccaggcagggaggctgagaactggctttcagcctggggaggagtttggaggattcgggagggagaggtttgtggggttggtggtggcgagagaagaggacaggaggaaggagagtgtgaagggaggcaaggggctgtgggcagaggggaaaggaaggtggcctcgggtgaggggatactcagagactactcagctgcctgggccaggcccctctgcagataagtgtggctggggtggtggtatgcagggctgtgtggggctcccagctgactggctgcgtctgtagcagccccactattcctgccctgggcctcaaaccaggagcgtcccaggccttaggtcagctaaccaaggcccgacattgctggcaggggtctgcaggggtttctgtggatactttgacatttttcacaataaacatcctctgttttgacactggtaacttcactttgttagaaaccagagactgtcatcttgtcaggccccatccgccataatccacatgattttaaaattcaacatcgtttacacataaacatttagtgacggtttctctgtgaatctgacaagttaatctgctaagaattcacactgacaaatgggctttgattacaccagccattgctgatgtcattctgataggggcggtcccccggatggcaatgggttcctgtaggctgtttggggtgaagtcgggggtgggaggactagtaggaccaaagccaaaatgtgtccgttctgagaaagaaagttctgaggctggggtggggcccagcagtcctggaaccacacttcccaacaaggccttcagcaatcccgcctacctttctctcaggaggtacccctctaggaagctcaggcttgccagctccaggcagggaggctgagaactggctttcagcctggggaggagtttggaggatttgggagggagaggcttgtggggttggtggtggcgagagaagacgacaggaggaaggagagtgtgaagggaggcaaggggctgtggtgggcagaggggagaagaaggtggcctcgggtgaggggatactcagagactactgagctgccggggacagaacataacctcctctgtttggctcagccaggtctccttttatcactttaatgctcatatctggtcccaagggatatggcatgcaaacctggtggcaggacaggacctctcttgagtagcggctgtgggctcgtaaccagcccctagtaaagagactcatgcaggagtgaggggctgtgtctgtatggggagaggacgcaggagagagtcaactcccagagcagcctgaacacaagggctagaaagaaacacgcacagaaaggagagagcagcagagacggaaaggcaatgacaagagaccacttataggtagacagaaacgaaacggtgagaactgccagctctgcagatgacacagagctggcaggtcctaggaattccttccaaatgaaaaaaatgccagaatcctgggagccaggagcagaaaaccctagtgtcattgacctgtggggtgaggcatgaaggccagctcagggttgagggtgaggtggtcaagcgcttgggtgagaaacccagagtgggcctttggcccaaagatgagattctgcttaccccaaaaggtcttgaaaaccgggctgagggctcagtcctcaagctctcaccaacctcaaactctagccagccttcaaagtgctacagcttgtgaccaaagagaccaggaagcaaagcccactattcactggggaaatgcctctgccccaggcctgaaatagggtaaacactcaggggtgaacagagaaggtaggaaggtaagcatggccaagaaagggaagtgtgccccagggacccctggggggctgccctcagagctgcagagggctgggctcgggagaccatggccagcaccagctacagtgaatcataaagacattcttgctgtcagacggaactcactgaggacacccaagaaaggaaacggatgcatgcggggtgaagaacctcgcggcctagggctgggcttcctgggctaggctcatctctagttggcccagggtgcacctggcattccctggggctgggggagccaggacagggaggttgggcctcaggcatacatcagccctgagcactgattccttagacttcccaggccagagtcagtggagcccttctcaggggctgaggatgggtaggatgaggtagggcagtggggatggaagatcccaaggcggaggcaaagctgtacctttgctggcgggcatgaagtccttagccttgtctttgcagtagtggaggcagcaggacaggatgagatcatcgttgttaccctggaggaagacgtgtgtgagaagcaccactgggcagaagggggcgccatgtggaggaggaggagggatcctctgcctcgggggccctgggcagggccacctccccgatccctcccatgcatgcgctggccctgcctggcctgatctgactgtgctacgagtgacttaggggagaaggaactcccccacctgggcctccatggtggctggccctcagctgcccaggctgatgggcctccttcagcccttccttcctggagaccttgttctggaagctggctgtgggctttcccttcctgccacagggtctcaccagctggccagtgatgtcctcactgcggaaggcgatggattcgagttcattgccacggctggtcagggctcgcaggcaagagtcccgactctcgaatcgctgctcgaggaactcgatggacttgcgggccttctcttgtaccacacgggcgtagcccccagcccggtggtctgtctcctgccccttggccaggccgtccagctcattgatcactgatgagatagagccccacaaggtatcagcctcagcaatcagctttcatcctaggcctctgtccattcactttcccagccaacaccttcccagaccagaatccatccttcccccacaggagtcttccaatgaaactagggccggaggggagcttgtgggggcaagaagtgtctcgagatttcacagggctctactccctttctgtctcttctcctgggccctgccctcctcttgggaggaacttaaaggaatcttctggagctgctgtatttagaggaagaaatctggtccctctattgcattccttggttacaggactcacgtgaaagggtccctcaggagagtccagggtatgcagcagctcgagggaaagggaggcgtccttccttaactccttgggcccacacacactgcagtccaggaggggtaaagttctacccccagccccactggtggagtgcagggaggtcaccatggaggaaggggcagtcacagcctcatttgcaaggccctggtatttctcaagaccagaaccttggcacatctaccttctctgatactgcacgtgtgtgtgtgcgcgcacgtgtatgtctgtgtgcgtgtatgtgtctgtgtgcgtgtgtacatgtatgtgtgtgtgtacatgtgtgtatgtgtatgcgtgtatgtgtgtacatgtgtgtatatgtctctgtgtgtgtgtgtgtgtgtgcctgtctgcctccctatgtgtctgggacatggcttcattttctggtgaagattctttccaaaattccagccaaaagcctgaggtcaagtgggaaatatgtgctcctcgggggctctgggagagtttggggtctgaggcctctccttagcgcagtgattcatggctcagggagccggcgtgagcatgctgttccatggtgagcctggcactcattgtctgggtattcggagacactttctggaaagggcccatgtgggaatacacacacacacacacacacacacacacacacacacacacacaatgcccatgctttcggcaccctgaggctgcagtgtccacacagtgcatggctgaggttgggaagcagtggtagatgggtgtatggtacagcaaacaacatcaaacaggaaaaacgggtattctatcccaaaatctgctttcctgcttccaaactaaacaggcttcaaagaggaagcttgtttgtgcttctgcaccaggcggggcttctccacgctggggtcaggtctgcggagcacagagcaggttaaagagcaccagaaacaagaagggaaagctggcggcttaaccctttgctgctctgggcacaggacgtgagtctaccaaggaaagcatcagtaaacaggagccctcctcttacagcctctgggagagtccaggagcctgcccagctgaggcaggtccagagaggctggcctgtatggctgtagcacaactgtcagttcccagcacccttaggcgtcgtctctttgtcctgcatgtatctgctgggttttctcatgcgtttgctccctccccaccgaatccggatttccttactaaaccctaagctcctcagggccaagggctacagcctgcctttcaccggatcaagaacaaggagactcagcccacagcctggggtacgatcagtcctggtgacaaaaaaccctggcagcctgggacggcgtctgaggcaccttacggctcttagggggctcctgagatgtccacagcctctttcagttgtaccctttcctgaccatctagcaaaacactttctttcccctgaaaagctcctgggtaggaaagcagagagacatatgacccggcaaggcagcccgccccagcgaggagaagggaaagcctgggacaacgtgatggttctgctgccctgccttggtgacagaaactgttctactgttgaagagcagaaagccttcccttaggtctaagggcctggatttaagaggttctggccaggccacatggggaggggaaggaagacggggagggtggaggcagggaggagggctgcttcggtgccaacattctcaggtggtgctaacgtgtttcccacaaccccccagggttctgcagcctctgcaggggcggatgtttcctgccctttgtttccacccccatctggcactaagacacttgggactgggagggaaggcccaatggaacatcttggcatggatgtcaaaggtggcttggcaggcagactgccagtctggtggcttttccagaagacaaggctctcaaacttgctccaagtagctgctgagaaggggatgtgcaaacgcctgggcctcccaatcatctcctagactctctccctccacagaggccatcagctagatatgagcccagagcccagagcccaccctgaggctgacccaccacagagctccaagaactaagggtacccagacggtcccgtggagacggcccagctgggcctctctggctagagggtgggaaagcaagctagctgggtcctgagatgctgaccctgcaccagcaccaaggcccagacagtggtaagggcccaagtggtaggaatccacaggcatgagccaagggcttgctctggagggttcctgctggcctagccttagggtgacactggccagaagaatgctacctcgaaccaacagagtgatcatgaaaagctacaagacaatcagaccaaaggcatctaaccacttcaaaatcctcccagcctccctgccagaccacccagcagcactgccgttatctgccagggctgagtgtttaccaataacgggaaccagctttgctgttttactgcaagctttataaggataaaaacaagggctgggctcatgcagcctctggttgctgggacacaggagtccatttgctcaagcagtttaagccatggatcagccatgagaatgtgaactactttgattattaaacagttttctttgccccacgcgttccctactcccctgcaaatcccatcttacacacgcacagcagggctctgcctgcctggcccccaggccgtggggcgtgtgtggagggggctgctgtgcacatgcaaggccgctctgcccttcccgcctgactcaccgatgaggggcaccaccaggatgtacttcctgctctccagcagccgcgccagactggccaggtggtcaatgaagccgttggtgtctggtacgaggaacaaaggtctgatttcgagctccatctgcctcatctgactgtggtcctccaggacagcctatggggacagagtggtgaatgagccagacagcgagcaggcaagcaggtgggtgagccagggccctgacactacggtgtgtcagcatcctgcccctaggaacctcttcccctccacagtaataaccagtccccgtcgggtctcagggataggcccaagggctgagcatagcactgcaataaaaacagagctcaaggggcccagggaatggcatgggtacaaccctgccgagggctgagaaaggatcctgaggatattcaacataacaggtctctcaaagtaagactgggactcaaattcaacaagggagaattaggttccttagatatgaaagtggtttcacatacattatctagaaagcctacagaggaggtacttttcaatctagacatgaaaatgcaaacagaatctgttattttgacttacttcactgtgtagctaaaacaaaacaaaacaaaataaaatataccctgggcaacatgctgaaaccccgtctctacaaaaaaaaaaaaaaattagctgggtgtggtggcacacgcctgtggtcccagctacttgggaggctgacatgggaggattgcctgagctctggaggcggaggctgcagcgagccgagatcacaccactgcactccaccctgggtgacagaacgagaccctgtctcaaaaaacaaaaacaacaacaacaaacaacgaacaatgaagttgaactcaaaggctatacaaaaaagtgatactgacagctaataatacgaaattctcctgcagcagcagccgaagtccgtgcaatgtgatgaattaagactcaactcatgtgtctgcaaagagcaacacccaggtcgatcacaatggcccaccaccttgcccttgaccagcgcagtttcctaaacacgggtcttttctgttctacctctgctcctttgccacgaatctgtaccagctacactattatttactcgacgtttttctttaaactgactttgtcactttttttcttagcctcttcttcagcaaccatatcgtggtactaagcaattgacagcctagtcatatgcttactagtgcaagctaaactgccaaacaaaaagtagacaaaagaataaaagcagaagagtctccttggccccactgtcccaccgcctcctctagcacctctcaccaagcacgtggcccagcgcttgccttccctgtggactttcacatttctcagggaagttcccgagagatgcacatttgcaaaagcctgattttcttctctgacagccttacacgtgtggcagcggcccttcgagaccggctctgggtatgtctgccactacagaacatggccactactgcactgcttcctcttctggggaccatggccaagaatcgaactgatctgctggcatctgcccagacagcatgctccctgagtagggaggtggagggcacccacacaaacctggcggggccaggagggcaggtcccagccctgtcacaccctctcatggccttctgccacagagcaacttgcagagacccagatgcaggcacagggctggggaagtggacgtgcgtgccaaccgagatggggcccacagtgctggtcctggccaccaacagtcagtgaggaggctgctcaggtttcactgacaatgacagtaaaactgaaagggcatgccttcaaatgatgggggtggcttctctgtgacctgccagggacctctccctatgagtaagttgttgctgccactgccaccacagctggtaaaggcacaggctacagaacgctggcaggcatgagaaatgcagctcaggggcccgctctgctgaagtcttcctactgatctcacctcatgagagcaaggtgccactactgcgggctaccttcccatgggaggcggggtcactgaccctctacatagggctgccacctagagggtgacaggcattccaacaaacctggcttgggcagtttgtaagaacaggaaatggtccctgctcaggttcagtaaacccctctgccctttctcctcttgcggaggagcatcagcactctcgttcctcatttctcaggccatgcgctctccgtctagctcttctgttgccaggcatgctctcctggtaccgtggctctcaaatctgtctttctgggtgagcagggacagaacaagcatggcttagggagacgtgggagcagtggcagctggagtgacaggggctgggggtccggctctgcactgcgcctctgcctctgcctctgccccgcaagtccactaccatctcagttctcctgccttgagaaacaaccgtccagcctggtctgactctatcaaggaagtggctgccatttttttttttaccctatgtgaacagtcagctcctaagccctggtaccatcctacctctattgctggcaattaggcaggagagccttgaagccaggtggctgagggatgctggggacaaactgagcctacctgtgtgttctgatggcaggacagaagaaaaatctagaagcgaggtccagagacgctctaaattccccgggttcttagctctggcttgcagctagaaaggtgaataggccgcagcctttcagagggggcttccctgggtgtggggtggggccaagccccgtgagggtggtcagagctgtgctgccatcatccggtcccagggacgcccgcagacaacttcccttaacctggctctgcccagtgagtcaccaaacaactgcttcctgttccccgcatgccctcatggagtctcaggagatgagatgaagctgctcccttttctcctggggtaccggtgggcctctgggcggggggggtcacacctgggtcacaagactggctcagtccccttaaaaagagtggcaggcggaggagggcttcggagtccacaggcacccttctacgggtgtctgcatttccggccctttctgagtggcgctgtgtgtgtgtgtgtgtttagcatctgccctcccaacttttccagattttacccgtcagattcctggcagctgtgcacggcgcctgtgccggccgtcacgtcccattccgatctctgggtcgcacggtaagaggaggacacaggatgcgcagggagtgaaaaagtgatgtcggtggggagagtgccaagtccccactcgcagccatgggacacttggggagcaggggaagcatgccgctgcagagttcagaggccggtagtgaggtttatttttgtttgtatgagtaaaaagctgcagaagcctctggtgggggtgaggggggtgcaaccggaatgctgtggttcagacagactggccctggcatggagtcaagcgtgctgacccggaaggagagttccacaggaaccttctaacagcagctgaggttgggccacagtgatccctggatagtgcccttggaacccaagcaacacacggacactctgaatcaggttggtagcaataaggacccaagttggcataaaatgtggaagaaaaaaataattctgtttctggaaggtgctaagtaactaactttctctaaggtatgggagtttcctggagcaagctggcagagaactgggaaagagatcatatacaataatacctaaggaggaagctaacaggcttgggtctccaggaaaaacttttgcaggttaagttccttctctacggtggagatgatcttatgatgcttaccgctgcaagctgagacactgaacattacaagtaacagcaattcaatgagctgacacaggaggtgtggcacttggagaacctggatcatgaagcagagcaagaccaggagagggccttctgaggtcttccttctgcttaggggctcccatagggagtgcggctgcttccttccctctacagggtgaagaatcattcatccctgagcctctctggccagagcaatgtcttcaacagaaattagaagctttgtaacacaggaaatttccacattcaccttatatatgaaagtacctagcaaagtgcctgacacatattagtaactcaataaatgccagcttcctttcttccttcctaactctattttttattttctacatatccagagcataaatatcagggggaaaccaccaggaaatagaactggggatgaggaggggtggagcagaggactactgatgtgttttttttgttttgttttgttttgttttgtttgagacggagtcttgctctgatgcctatgctggagtgtagtggcgtgatctcggctcactgcaatctctgcctctcagattcaagcgattctcctgcctcagcctcccaagtagctgggattacaagcgtgagccaacacgcccggctaatttttgtatttttagtagagatggggtttcaccatgttggccacactggtctcaaactcccgacctcaggtgatccgcccgcctcggtcccccaaagtgctgggattacaggcgtaagccactgtgcccagcgtttttttgttttgttttgttttgttttaaagagacacgagtctcagaccaggcacggtggctcacgcctataatcccagcactttgggaggccaaggcgggtggatcatgaggtcaggagttcgagaccagcctggccaacatcgcggaaccccgtctctactaaaaatacaaaaattagctggacgtggtggctcatgcctgtaatcccagctactcgggaggctgaggcaggagaattgcttgaacccaggcagcagaggttgctgtgagccgagatggtgccactgcactccagcctgggcaacagagcgagactccgtctcaaaaaaaaaaaaaaaaaaaaagagacagagtctcatccaagcctgaccaacatggtgaaaccccatctctactaaaaatataaaaattagccaggcgtggtggcacgtgcttgtaatcccagcactttgggaggcagaggtaggcggatcacttgaggtcaggagtttgagaccagcatggacaatatagtaaaaccccatctctactaaaactacaaaaatcagccggggatggtggcacatgcctgtagtcccagctactcgggaggctgaggcaggagaatcgcttaaacccgggaggcagcggttacagtgagccgagaccatgccactgcactccatccagcctgggtgataagagcaaaactccatctcaaaaaaagagagagagagagtctaactctgtcactcaggctggagtgcagtggtgcgatcacaggtcactgtagcctgaaactcccaggctcaagtgatcctcccgcctcagcctcctgagtagctgggactacaggtgtgtgccaccatgcccgcgcttctgatttctatgaaaagacttattgtatatatgtatcttaactatgtggatgtacatgaaaaactggaaataaaataaaaataggaacagtgggtgagataagcactggctaactgttcatcctgggccagcagaagccaacgagggcagatactgagggtgctagaaaaggcaggcagagccaccagcagcatcccctgggagcaggaggaggagcatcttcatttggggtacactgcaaatgaaaaactgctgcttagaactccttttctggatgtccaaatgtaccacagagcttaatatattcttgcactctttttaaaagtgataactatggcaatttgtttgctatttcttactgttttaggaggactcatcttattttcaaactagactgtcaagtgctcaaggagaactgcctacttttcttgcagtttccattgtcatacctcccataccgcctgttgtatcataggacttcgggggacagtgggctcagtcactggctctcagagctgaagggcacttaaagataatcggattgaattttaactgataacttgatctaaaaagccaaagaagcaggcaggccctttcctgatggagagggaggggcagggctaagcatgacacctttgagcttgctctgagcagcagcctgagggcgtttcagacagtggcctggccactctgtgggaagccaggcccccagtggatggtgctggagcaaaagctggggcccagcactcaggttttggggaggctggagcgggtctgggtgggaagggcggatgcccgctccacaggctgatgtgctttcctgccttgacgtgaacgtgcccccggcctggtgctgtgctggctcccaccctgtctccgacagccaggagccaggcctgagtgtctgccttccgccagcttccatacaggtgtggggggctctgtgtataccccattgttccacaacagccccccctagctgggtggcagtatgaatggacggcagctaaatttagagtggaactcctggggccaccacaaaggagggactacatcttcaggagggcgggtgggcgggaaagggacaggggagagaagctattttgagaacacatgtcattgctggccacagagcaagactgtggccataatgctgagggaaacaatagatgtggccagaggaagagcctgttatgtttcaggtgggatgtttgcaactgctcaggaaacctgaccccgcccgacagcagcacaaatcacagcaaagcctcagagaggcagtgaggaagcgggggattcacagggccagggccagcatgaggtgccaagaggccacgcctcatgcctggaggagcattttcagtgactgctttgccctggtggtttggttaggaatcaaacacttctgaccaacttcccaaaccatgtaccctgccctggtctctgaacaactccaaatggcaatgggaacaaaaagaactcaggagaaaagcagcaaggtgggcagaacccacaggaggagctgtctcaggcaacaagacagagcgtgggctgagccggagagtgtggcctcaaagccctgggtgggcggacttggcgcccccagcatccaggggcctgcctgggcgctgcagctccagctgcacaggctctgagagctccccacaccccttttctgacctccagtcggccccactcaccagcctctgtgcaacgccggaagcagggagggacaggctgcagagggagaccaggcctcacctcccccatgctcacagaagagcttaggcggcccaggggtctaggtaagagcagggaagtgggggtgtggttacagccccagatctcacttggactttatagctatcctgggggccaggaggatttttttcaaccccatcttcacatccccttccccaaacatgcgtggttcctgttttgccacatctgtgagaggcgctgggaacggggacttgccttacacctctcggttaacaccctggagactgatggagttcagagcagggtaatttacagcccatccctccaatcttaattcactcgatgctcctttcttccttattgtattagtgtgacccaggtacctgccaacaataatggcctctccagctaggagcctctccccaactcccaggacaatttataccttttccttggattttccccccttaaattaaacaaaaagaggaaaaatgagaaaaggttagcatgggtttggagcactgaagcccccgtggttctgggcaggaagccaatggcctgagggcacacatgtgtgtgctctcccagaagggccttcaccggccctgttttacagccacctcggcacagactccagggttcacgcatatggccagacagatgtgtctggcttacgttcaaggctggaaaatgaagaattatggaagtgaagggccccgggcattaaagcggggtggggaagggaaggggggaatttttcctctgctgagaaatcctcttgtggctgtgaggctggaggaaggaggctgacaggaggcagggccgccagcttggtgcatgtggggcctgttcttaaaggggccacagcaaccccaactccagctggcccgcagcaggccttccatgcttgggcctaagcagcttcctcagaaggagctgatcaggagaacaggcagcctggacagggcccaccaggcgcacgggaagtcaagcgttggaggagacctccaattctgaaggtgctgctggtcgctggagaggcaaagctaaacaccaagctccagaagcggatggatcctggcagcatgtgctccctcggcatcctggacttgcgttttgtacggacgctcattcacacttcaaatcacttgtcaaggactctaccacactgtaccactgtacactctggaatgtgattagttctgtgtcccccagacactggcacagtaaatgctcaatgccgcttgctaaactgagctgaagacatgcctcccgattccaaggagtgcacagacaatgtgggaaacaagtccagaaataactggaacatgagacatgatggcaggtccacaaatgaagcctgaagagtgtcacaggaacgctaagcagaggcagacggattcctcctgggggagaccagggggggcttcactggggaagtggagtttcatctggggattgaaggaggaatagaatttcgacaggtaacaagacatatggagcagaaaaagggcactctgctttgagggacagcatgaacaaaaacccgagtggaaaaaggcagagcatgcctagggagtggaaaggaaggtgggtgtcactgtccaggcaggagggccttagtgtctgcacaggcattttacgtgcactgtggttcattccgaggcctcacagcagctctaatattggtgcttttaccactttcactaaaaaagtgtttaagagacggggttttgctatgttgcagtggttattcacgggcatgatcactgcacaccatagccttgtactcctgggctcaagctatcatccagcctcagcctcctgagtagttggaaccataggcacgtgcccactgtgtctggcattactttcattataaagatgaggaaacaggctcagaaaagttaaataatctgcccaatgtcatataactagtaagggttcatgagggatggggtagtgggagaagaggctggaaaaacagactgggaacagatcaaaaagccttaaatgccaataatagggaattaagacttttttttactagccaagcaaaggcctgatgatttctgagcaggggagtggctctttcaggaagagaatgatggaggcagtgcagtgaataggagcctggtgggcaggagcctggtatgctacaaactccaggaggtgccacttacagaaacaaggcaaatggcaccttctggggctgtgcaatgcaggggccttgactgctacactctaagcaactacttgacctagaatagtagtagtggcaatggaaacagagaggagaagagggaataaatgtgtgaataaatagtatttaatatgaaattagatactaggggttaaaagccagagtggaatttaagatgatgctctagttgctactattattgtcactgaatactttttttttttttttgagacagagtctcgcccagggctaaagtctaatggctcgatctcggctcactgcaacctccaccttctgggttgaagtgattctcctgcctcagcctcctgagtagctgggattacaggcacccgccacaacactcagctagtttttgtatttttagtagagatgaggtttcatcatgttggccaggctggtcttgaactcctgacctcaagtgatctgccagcctcggctgcccaaagtgctgggattacaggcataagccactgcgcccagccactgaatacatatctgctgagcactaactcagcttgctgagactaaggagtaaaaggaaggatggaggagaccaaaaaaagaatggtggtgaggaagcccaggagggtggtctggcgaacagggagaagacaaggggtcattcatcgatgctgaagggaagctgaaggaaggtggctttagggcccaaagacaaagggaggtcaactatgacacagactgaaatttgataaagataggtcattggtgattggtcaactatgacacagactaaggtttgatgaagataggtcatcggtgatttttctttttaagatggagtcttgctctgttgcccaggctggggtgcagtggcgcaatcttggctcactgtaacctccgcctcctgggttcaagagattctcctgcctcagcctcccgagtagctgggactacaggcacccgccaccacacccggctcacttttgtatttttagtagagacagggtttcaccatgttggccaggctggtctcgaactcctgatctcaaatgatccacccaccgtggcctcccaaagtgttggcattataggcgtgagccaccgtgcctggccatattggtgacttttgacgcaacagtttccataactgctgggttgagagtcaagaaataacggtagaaacagaatttctgggaaaacagatggtaaggaagagcaagaaaagaagcataagggcacttcgggaggccgtggcgggcagatcacgaagtcaagagattgagaccatcctggctaacatggtgaaacctggtctctacgaaaaatacaaaaaaaattagctgggcgtggtggtgcatgcctgtaatcccagctacttgggaggctgaggcaggagaatcacttgaacctgggaggtggaggttgcagtgagctgagatcacgacagcgagactccatctcaaaaaaaaaaaagtaaaagaagcatgaggataaagctgttttgaggatcatgcacaagtttacatgtagacccacagcagggctggggaggcagccacatgacaatggatgatgctggtagaggtattacacactgattccaatggtagcagggacgtgaatctgtctaaagaatgatggaggctgggcgcagtggctcacgcctgtaatcccagcactttgggaggccaaggcgggcagatcacctgaggtcaggagtttgagaccagcctggccaacatggtgaaaccccatttctactaaaaatacagaaattagctgggtatggtggcaggcgcctgtaatcccagctacttgggaggctgagacaggagaatcgtttcaacccgggaggcagaggttgcagtgagctgagattgcgccactacactccagcctgggcaacagggcaagactccatctcaaaacaaaacaaaacaaaacaaaacaaaacaaaacaaaacaaaacaaaagaatgatggatcttggccagtgtgacggctcatgcctgtaatcccagcactttggaaggcagaggcgggcagatcacctgaggtcaggagttcaagactggcctggcacacacagcaaaaccctgtctttactaaaaatacaaaattagctgggcatggtggcaggcatctgtaattccagctactctggaggctgaggcaagagaatcgctggaacccgggaggtggaggttggagtgagctgagatcatgccactggactccagcctgggcaacacagcgagactctgtctcaaaacaaaaacaaaaacaaacaaacaaaaaaaagatggctctcgattggtatttattcctcttccctggccagggtgattagacaaatatcagacaaaggtggccgttcatggagcacatactaagtgccatgcactatgctaagtgctttacatacactgtctcgtgtaggcctcacagtgactctgagagataggtgctattagcacttttttcttttttctttttttttttttgagatggagtctcaccctgtagcccaggctggagtgcaatggtgcaagattggctcactgcaacctccgcctcccgggttcaagcgattctcttgcctcagcctcctgagtagctgggattacaggtgtgcaccaccatgcccagctaattttttgtatttttagtagagacagggtttcaccatgttagccaggatggtctcaatctcctgacctcatgatccgcccgcctcagcctcccaaagtgctgggatgacaggcgtgagccaccgcgcccggccagcactttcatttaacagatgaggaaacaggctctgagaagctgaatgatttgccccatgttacaaagctatttaggtggcagggcctagactgtcactgggtctgcctgatcacatgcatcaaaccctatgccaaaggacagggttggaaatgggcatccttaaagaagcggagtgggtggcttgatgcttccctatgcacacggttcacctttaaacggggagcaggactgcctcttccctgtctgccccgagccctagaggacagcaaacggcctcacagcacaagggaacagacctagaaggccaggaagaaacacttgctgggggtgaaggcacaggcccgtgagagggctgatgggggtcaaagtccctgtgtggagattaagtagtttgtctctgcaagggtgtagggagtatcttgtccagaggagtcttccatttcattgggaatccaggcaagcagactgtggccatgccatcctctccctgggaacaggcgttctgaagtaagaatccacagcctctccagggatatctggataaggctcagggaaactctgaaacccctcacattgtgtgaaagatcatgtatgtgtggtgtgcatttggagattctcactggggaagcagcttttctcagagtctctgagaagaccgtacccctgccttggagcccaggatgagggagactctaggcaccaaacctgctaccagaatttagtggtagagtgaaaaacgggtagagctagagagaacactgcaggactgactcactcttagtgtcctgctcagctctgctctctgcccacatcctctcatgccctagacagcaacccccatagtgggaaccacgctccccaggccgacttcacctggatcttttcctggcgacgctgctgctcagctatcttcctggccagagccagcttcttggcccgaagctccctgatgtcatcctcgcctccgctgccttcagcctctgaatcttcctcaaagtcttcaatcaccacatcctcctcctttgggtggtggagccgaccaggacaaagaggagacagttagctgggcccatggctcttactgaacccaacattgcccttgtggcccctcacccacgcagactgggaccatcccttgcaaagggtcccctggtgtgtgcttccctctactcaggcaaagggaggttgacaaaagctgtcactcttcccccggagctgctctcttttatactctggggcttttccctcagagagttacaccataagtcactcgcaatcacacatatatacctgcgtgctttactcacactctgtgttcttcctggtacacactcacaaagtcaaactttaggcctattttcattctgaagtcaccaatgattcaagagggaaacaacagagaaagttaaaccacccaacttaaatctaattcatgctaacgatctgataggaatcagctctggccaacagctgggaatgaggcgtggaagttcccttgccgcagacagcatcagggacagatgctgcagctcagcagacctcgccctggtttcttttgaagactccagcctggtggtgtgaggactgctgggcccctttactggaattcacacgacatgaccttgctcagctgccctcaatggcctgggcagggtaggaggtggctggctggcttaaggagcctcctgccaggctggtggcacattccccaaggatggcacctccctacttgcagcctcagctcttagcagccatcactccctgggtggtcccaggctccattccttgctttcttacttttggccttggtcaacagagaacatgcagctgcccaagatagcttcctttgagggacagggttagcatgggtacacagggaataatttagtagaaggttcctgtttctaactggattataataatgacagtgatgacaacagctatcacttactgagtgcttattactggccaggtaccgggctacccatttttcatgtattaactcagttaatcctcacaacagcctgtgagataagataggtgctatcaccatccctatcttataaatgaacaaactgaggtttagaagtcaacacctcgctcagggtcacatggctagtaaaggcagaacagggattgaagcccaagtgaatctgactccaaagtttatgctcttaccaataataataagctaagccatcctgaatccagaccagaagctcagatccagccctcagtggctcagcatcgtgaggcctgctgcaggcccaccctagatctgttcagtacagactgctctcttctctaactgtccagctcaaggtcatatacagatggaatctcttgactgaaagggattactcaggtgggtggctgggtagatgacgggggtatactttgccttgtgagcagaatctaggggtgttttggtaggatccctaagcgactaaactgtgttctattcacaaagaactatgtctgaagaaacacctttccctacctctcccaatctgctgaagtgattcagttttgcagtttggggagagatgagatctgaggatggggccagaactgtcactatcctaagagatgtcaggggtctgggatgctgtccacagtcaccattcatctgacacaggcatgctatagtgtcacagcgctcacctccagagaggcccaggccgtggaaagaaggaaaactctgcacattcacttccttgttcatgaggttaacccagactgcagtgagcgggacagaatgcctgcctagcccatgggggaacactgcctctgcctgctctgactagggatatacaaggttatcacggggcttgaagtgagcttgactgaggtcaaaagagggtcagagaagcttgtctgaggttggctcagctctcacagtaaacgaggaagtgcaaggttatgaaattacacagaccagggtaagcacagtttcccagaggccactaacatgaaggaacccaggagactcgtgggaaaaggaagaagtgggcagcctggtgtgggtcacaacctttgtctggtcaataagccttagaacgagaaaaaaaagtgtggcactaccaagatccgggaccagagaagtcatctgttccttgtgagggcagagaaggccttctctggctttggtgctgtggccctctctgggcctcacttgcctcactggatttgggactgcaggctcccctggccacagggcatctttgggcaagcctgggagctaacctggctgtgccctcagcctgaaagtgcgggtgaaagagctgacggaggcactgctccacctgtgcttccccacacagtacccagggcttgggtggcactgctctgccctgcctgaagcctggatgccctgccagctttagcaagcctgctgtcccctcccatgctaacagctcattctttcccattattctctgcccaggtttcatctggagagtctggaatcctaggctcagctttatccctggaaccacctctgtcctggaagctgagccctatgtcatcaggggtggggtggggctctccagttattctaatgaagccagtccaagactctgctgctctcaggactctgatccaaaggtggccactctatcactgtttcagatcacaaacgacagcttccagctgacatctggcttccttggcctgttgctgacttcatccctgtaccccgccctgctctaccgggcgcttgagactgctgcaggccaaatgactgtgttggcctatgggtgacctggcccctggctagaatcgcttccgtcccttcccttagtcccatgttccttcccacctaagtctcttgtctttaacactgtggggtaaaaagaagagtcaaccttcaggtaaaagtgaggtgtgtgtgaacacacatccagacagaaatacccacacccagacacacagcagggcagctggaagtgatactaaatgcatacatgctccaacaacatcacactcacaaccactcagaacccacagagagcagggaagctggcagcagtgtttacttaaactgacacacaaacccagcacacacagacccacatcaacaatcactcccagaaagacacaaataggcaatggcaatatatagggcagggcaactgccagtggactattgcaggggcgggtacacaggctcatgcatgtgcatgcgcgtgcgcacacacacacacagacgcgcacacacacacacagacacacacacacgagtctggagtgaagcaagggctacaggaacaaccaagggcaaacaaacaagaggagaattccttaatcacatcaggatgtgcaggagggagggagggaacaagggagggagggtagggcaggggaggggtgattttccacacagggccagcaatgtcagctcttcctgtacgtgtgctggaggctggagttcaggcctgtgctgcattgggctccacacatctataaacttgatcctgaccacccccctctccctttcctaagcctcgagagctgcacattattcaactcctttctttcttttcctcccttctcctcaatgcagcattaaaagaagcatctggaactcgtagtggagtaggatggaggcaccggggtggactggcaggaaggggcaccatcagagcacactctcgagaagctggctggtcacattaacacagacgctgttctctgtgctcataaataagcaggaggaaaagctgaagccacgagcagaatggggagggggccttccctctgccacagcgggctcttcccgcatagtacctcatcttccagtcgtgttccctcttggcttcccatttcctttcccatggtgtctgggacgggtgccactgacacatactttccacccttgaatgccagcagaggctcttcttgtccacaaagggcttccagaaaatacttcagcactgtgacccttttgcagtcagctgcaataacctacagggtgagagggagagaagaaaaacagcattttctgaaagggaagatggagacgagatgttgcttgccggctgaggggcacaggggaactgtgtcaaagctaccaggcaagggggtcagaatgaatgacggggtgcggagggcacaagggcatgtcaggtggtaagtgagggcccagggcaggctgaggatcaagatcttctgaggttatctctccttaggttatctctggggcagcagacaaccccagggaccagtgacaggtgccttacatttatttgagtaaggtcctgatacaaaacagaatatatgacatatcttctaagtttggtctagaaccagcagagggaagagtggagtgctttcacagcatagagctttctggggcccctcgctgccactctccactcctctcccagcacccctgctccagactcccaaaaggagaattttcagcccaagtgcaaattgaatgctaagggctttcttggctgtttcatttcaaccagatcattttgggcttcccctgacaggttcctgccctatctaagagctcctcatgctcaagagactagagtcaggcaggaaattgtcaggagagagacaggcagagcaggtggggatgtttcaccaaagctatactctttctgacgtttacgccaacctgctcccatgtggccacatcagcacacaagtcagtgctgtcagagaagcttgggctgatttagctgagatgaaactcagtatcttgagcaacagtcaaatgtgtaagtgtctcagattaagtgtccaccgtcccccagtctgggccccccttctggaggcaccacacctgcatgccctctcctccacacccgtttgcttggctcacactctcctccatgcttgcccctgtgtgcccttctcttcatctctagcctccagcatcctcttctccctactggctgagtgctcaccaagggagaggggccctgctggatctggagcttgaaagctgaaggccattccacatgggaaacacacgtccgtggccagacgtgccacaggggacggccccttcatcctcactgactagcccctgcctctcttttaatgcatcctcgtttcttagtgtgaaaggaacttcacagtaataagccttctatctgcagcacatagggaagtactaacctggagactactgatgatcattttacaggtgcaggtgttctctctctcatgtggacagcaacccctctggtggcaaagcctaaatctcatcgttttcgtacgtcactggcaagaattgtaaggacaagctgtgcacacagtaggctcacagtaaagacggacagcccagggaagctcggctgggtaccacagagagcagatgaagcaggcatgacccatgttctctaagacagtggaaataaatgagcaccgctgtgcaggctggctgcccaggaaagtgcggcacacaccggtcaactgtgtgctctgtggctgcatcctctgccaccttcaccaaaaagccaaccccgctttcctacacggtctaggagtgttctctgctttctctcaccattggccctgttaccattataggctggaatctcaagctaagtactttgaccaccttcacctgagaggttgatgtagaaggttctcggctacccagaagggcttagaaaaagttcagccccttgagcttggggtgcctggtcctgggcttgcctccgtgaaggagaagggaagcttgtcttggcccagggcaggtaagcctggttccattgcgtgtattcaaacatgtgatgaggaaggctagaaatacagaagcaggggctaaaaggcattaaagaacagagccgaaatgagtaatagcctggcaggcagcacgcacagtggcctccctgcatctccagcctctcacttgcataggaaacttctgcatttccacaagactgccagtttcctctctgtggtctaattttaaccaccttgtcgttacagtgtgtgtcagccacctgaccccactatgacctctgaccttacgccccagctactgcttgcactatggagaattatgtaatgggtccaggattttccttcttggtgtgaggctgctgccactgaatggagaggagaggggagctaaggagtgagaagaggacagaggaaaagcttgcaattgtccttggcctcacctggacgatgagaggtacactggcacccctgctaagtgtgcagaggaaacctgcccaggacaggagtgtgccacggacacatgcacagacaggcgggcaggagtgttgctgctgctagagcacgggctacatggtatgctgcgtggctaagaaagcatggtttctggccgacagggagaaaagccacatgtgtggatgtgggactcctggagatggggatttccagggcacagcaggacccagggatgtggacatcctgaggccacctgcagcacttccttacagggtctgtgggaattgcctattccatggacacaagcaacgaggagtagccctctcccagttttcatttccgccccatttagaaggaaattggtttccttggggattgtgtctgtcatagctattagttccttctctaggacaaggacaactgctggctgatatgcaaaaggctgtgatctactggggtctctgacctggtgttaacaggcctggaaaggattctacctgtttggagagagaaaggttgtctgtcttttggaagagtaccctgtcctttgcaatccaagcagcagggaggatggtcaaagctgtgtaaagtgtactgtgggagtgagaagtgcacagtctgagctctttagtagatggagaaactgagaggcagaatgtccagggcttgcccagaggcacagagaaaccttctgtctgtagctcactggcctgtctgcaaaagcattctgtcttaacttggggggaataagcccactggggagaggaccaccgctctcttgatgctggagttctgtaggagacttacgggaatattctcctagacaaagcctccagcacttgagtcagggaaaaagcaacacaagacagtttaaatacagttaataagagacttcataatgaaagaagcctttcaaaccactgacaaaaagccaattccaagatgatctttgcttggtctaggaggacttcctggtaggagaggggttaaagctggactccctgcttggagaggaaggactccagatgaagtctgtgacatcatccccacagttaactctgctcgtgagcacatttttccactctatatcaatgaaaaccagagaatgtaagtggcatgtatatcgcagctctgggggcaaactctggatcctccagaggagaaagagctgggcgggagaggctcccttcctgggctacattagcacgtggggctggactggggatagaggcgactaaaagggccgccagccagggaacaccctggggagcctacggacctctcctctgcggtgtaccttctcagtcacagtcctgacccttctggagggagatgcactgtgtaggcgattgtcaagaattcccaagttaattgacaaaatatcacatacaaatcatttcaatcagcttgggaaagaaaactggggctttaggtcagggaagagctgaaagaaagcccctttcccttcccctgaagattgtcggaggcagcttaccactgcagcaggaactgaaacctttagctttagggctccagttatcactctaatcaagtccacacgcaaagaaccaagcagaaaggaaaactgaaagtgagatgtggagaggcgataccggaggctgttctctcctaggctcagttccttagagagagataatgtaagcatcgggtaagtaggggctggagccaaggggagcgaggaacaaaggagaaaacctctaggtcaagagagtagactgggttactgttctggggtatttaaggtggagaggtggagaagtaaagaaaaatggtgtttcttgactgggcacggtagctcacgaatgtcatgtcagcactttgggaggccaaggtgggcagatcacctgaggtcaggagttcaagaccagcctggacaacatggtgaaaccccatctctactaaaaatacaaaaatcagccgggtgtggtagtacatgtggtagtcccagctactagggaggctgaggcaggagaatcgcttgaatctgggaggtggaggttgcagtgagccgagattgcaccaccgcactccagcccaggcaacaaggcgagactctgtctcaaaaaaaaaaaaaaaaaaaaggaaagaagaaaaaatggtgttctctgaaaactggtgactcttcacagccactcggtagggaacaagcacagtgtgggtagagatgcccggcgggggaggggggttggggagagaaaacgagctatatgctgctttatgaaggtagggagggtaagagagaacgggaactaagcaccaggtatcacatactcatgtgctctgagttgcaagacttaacacctcagggcagccccggggaagggagaaaacctccaaatctagccagggaatatgaggaagggctggagagccaggaccctggatgcaagctctagggagtgagggactcgctctatcgttacctggtccccgttttctccaaacaggcttcttggaaggcacaaccatggttactagtcattttgcaaaatttctttttctgaatttttggtttggagaaatcggagtttaaacttgtactatcagccagttcttttttctagtcttaacagtccagcttgctactgctcctctggttaaagagaacaatcacacgggtttccccccacaaactcaagtttacaggttgtttttcttgtttctctaaatggagccaattattctcacatttgttgaaaccttcaatcaaactttatagcttgttaattttacagaatgtccttagagcaaataagatgcagacaggaacatgaagtctttctgagattattaagaaaccttaaaatagcctacaaatccaacaccaaggctggtaaaatacaggctgcttggctggcttctgaggtcaattagcaatgggttaattatcatctttaatgagccaaacctccaggattggccacaagaaatttaactcagactaatgtgttttcacaaactgggaacctctagttatgcactactcaccctcagaggaaactgaagggtgggaagctcaattctgtagcagccaagggtgggccagcctacgaaggggtctgccaatggaagttcagacacaagaaataaaaaataccacacagggaatcctctggagctgggaggacagaggaaatggtttattcacattcctagggggaggggcctcctggcaggaagcagactccagaaggcaggagcgaaactggccacaaggatgcacagtcagtctgaagacacaggcagtagcttaggatggggagacagacattcacagcctacttgagtcagaagaagttggtatgaaattgagaaagaggctcatgggtcagagaggagggaaagaaagaacctgtgcaggggctgaatgataagggggacagagtgagaaaaagcacacatccttggaccagatgcatctcctgacaacctcggagcatactgtccaagggatcaattcaaacagtatttcactctttccctacccctgctatagctgggcctctttctatgtaaagcgttaagtacaggctactttctcagtctttttgctttttttttttttttgagagagagtctcgctctgttgcccaggctggagtgcagtggtgcgatctcggctcactgcaagctctgcctcccgcgttcacgccattctcctacctcagcctcccgagtagctgggactacaggcacccgccaccacgcccagctaattttgtgtgtgtgtgtgtttttttttagtagagacgaggtttcaccgtgttagccaggacggtcttgatctcctgacctcgtgatccgcccgccttggccaaccaaagtgctgggattacaggcgtgagccactgcgcctggcccctttttctttttttttttttgagacagagtcttgctcagtcacccaagctggagttgcactggcatgatctcagctcactgcaacctccgcctcccgggttgaagcgattctcctgcctcagcctcctgagtagctgggattacaggtgcgcactaccatgcctggctaatttatgtattttcagtagagacggggtttcgccatgttggccaggctggtctcgaacgcctgacctcaagtgatccaccgcgcccggcctttctcagtcatttctaatcccggtgtccagatccaaccctccgtagtcctatggttggcctgtgctagctgaagggtcattgggtcacaagatgaaatgctaacatcattggtccacccacagcaaccacaccattccatgtgtctggtcccaacagctgtgttttcttcttagaggaggcaatgagggccattatcaatcagccagcattgcacagatgcctgctgtccccacctgtaaccaccaggtgtgtgctgaagtctcttagagaaggggaggtgggaactggcaaatggtcagatggcaagacctggtgctggtggggagactatcccaagacagggttactgaagatcccaaaaggtacacgtatatttggctactaggaaggagacgatgttcacactgaagggagaaccaggggaacaggggagttgtgaagcacacacaggaagtaatgaggtaaataaagtataaaaaacagggccattctggcaagaggcaagacaaggcaatacaggaggttggacaagagcctgggcttcatagttacacagacgtgagttcaagtactaactgccacttcctggctgtttatccttagacaagttacttaacctctctgagcctttgtttgctcaagttgtttgtgaggtttaaaagataatacaggccgggtgcagtggctcatgcctgtaatcgcagcacttggggaggctgaggcagtggatcacctgcggtcaggagtccgagatcagcccggccaacatggtgaaaccccatctctactaaaaatacaaaaattagctgggttagtagcgggctcctgtaattccagctactcaagaggctgaggcaggagaatctattgaacccaggaagtggaggttacagtgagctcagatcgttctattgcaatccagcctgggtgacagagcaagactctgttgcaaaaaaaaaaaaaaagataagacaagcctgggcaacatagtgagactgtgtctgtcaaaaacaaacaaacaaacaaaaaagctgggcatggtggtgcaacacacctatggtccgagctaactaggaggctgaggtaggaggattgcttgagccggggaagtcagagctgcagtgagccatgagcacgccactgcactctagccagggtgacagagtgatatcgtgactcaaaaagaaaaaaaaagacagagggaatacatatcaaatacttagcgagatgcctgggcccagtaggtgctcgataattgagcagctggcatttttttttcctcttatctccactctcttcagaggtgggaggggcactgcctaacatggctgagctgtttggaagccagtctgagaggcaaggtgggaagcatggggctggcacatagcctagggccaaggggagaggccctggaatgcttacctggctgttgaagctgcaaaaaaaattttttttaaatttgtccaggctggagtttgcagtggcgtcatcatggcttgcagcaggctcagtctcttgagctcaagcgggaagctggctaatttttaaaaattgttttgtaaagatgaggtcttgctatattgttggtctcaaactcctggcctcaagtgatcctcccaccttggcctcccaaagcactgggattacaggcacgagccaccactcagggcctgaaatattttattcagaactaaggtgctagatccaggctactgggctggccaagcaggggaggaaagaccttgcctctcttcagcaatccctctccctattcttcagaaagactccggacctaaccataggtatgcatgcattactccagtaatctagagaggctccaaggtcccgggcttcggaacaagcgggccactaataaatgtatcagaaatacagtcacaattgccttgtccatgaggtcccttcacagtggggtacgggcggtggctctgcctttgctagtgggatcgttgagggtttgaggaggccctgcaaaccctgcaacgtaactttctttctttttttctgagatggagtctggctctgtcaccccaggctgcggtgcagtggcgagatatcagctcactgcaacctccacctcttgggttcaagagattcttcctaagtagctggggctacaggcacgtgccaccacacccagctaagttttgtatatttagtagggatggggtttcaccatattggccaggctggtctctaattccttacctcaagtgatccacctgtctcggcctcccaaagtgctgggattacaggcgtgagccactttgcttggccaacagtatcttattttattctaagatggggtcttgctttgttgcccgggctgctcttggctactccgaactcctggcctcaaggaatcccactgccttagcctcccaaagtgctgggattataggtgttagccaccgtgtccagcctggtatctttcttaaataagacccagctggatccttgcctcatgtctcccaatatgaaagtagtgatgagaagatccccaatatggtattttctacccacctgaatttcctgagcttagatgttccaaacaaagccagataggagtctggtcttccatgggcagagtaagcttgctcttcttgaactgttccttcatggacagaaactattcttttctagagctctcggctccggctgtaccagaaaggtacattctcagcggcaaaagcgtcacagagagcaagctataggcagcagtagctcgggcttcagtccaattctgcttcccctgcagagtgctcttagagcagccacccacattggcaggggttaaggacggatattggcactgccaacacaagcctttcaggtctggctggcttcagctgatctgaaacctggaacacaggcgctggggccctcacttactgaaccagcaggggaggctgcaggctcagcccctggggatgaaagtcctcccgtctgtctcagtctgcaaatatccacacacagtctgtttctacactgccagttagctctgggccagaagcactgaaccttgggctctagtcactctgaaccacactgtttgccttctagacagccacgtccaggaggcctccccttaggtttgtgtttaggctcctttaccaaatttgctcctaattgtatttattctacgcgtggcacaagagtggactctcggagacatctgtagtcttcaacacacttaggcaacatgcagttcagcaacatgtaagtgcctactgtgtgtgtgaggcactgtcctccagaccctggggactcatcacagaacaaaggaaaatccctgtttcacttggggggttgggtggcgtgggtcacattcataccagatacatcaacagaccccctgcatcaagagagcacgcgcccctccccggctgccatgacctgcggtactcaggaaggcagaattctcagcccaagggagaagaaaagctccttgcagagacccaggacactgctccttcattcctttcaggcggatgggtcccgaggaagtcgggatggaaaattcttttgggcttagccttgctatcaaatgaaatcccaagctccttgcaaaccctcgcccacccacccctccccccaaagatcactactggcacttgtggctattattccctaatccggaacttcaagccccaggcaaccccctttgctataccctgcaggctgtctgcttcccctggcacctctgaaagttcacatattactcccccaacctgcagttattttacatttaagcaatcaattcattccctcatcgtcttttaagcttggtaaggtctttttcttttttctcttttttttgaaacagagtcttgctctgttagcaatcaaggctcactgctgcctcaaataactgggctcaagcaatcctcccacctcagcctccagagtagctgggaccacagaggcacaccacttatgtctggcaaataattatttattgagacagagtctcactgtatcgcccaggctggagtgcagtggcgcgatctcggctcactgcaaccttcgtcttgaacctgggttcaagtgattctcgtgcctcagcctcctgagtagctgggattcacaggtgcacgccaccatgcccggctaattttcatatttttaatagagatgtggtttcaccatgttggccaggatggcctcgaactcctgacctcaggtgatccacctgccttggcctcccaaagtgctgggattacaggcgtgagccactgcgcctggctaatggctaattttttttttgtagagacaaggtcttactatgtcccctagctgatctcaaactcatagctttaagtgatcctcctgtattggcctcccaaagtgctggagttgcaggtgtgagccgcccatcccagcctataagtccttcaagacgccagttagcctttgtccagtctgccagcctaccttccacaaatctttcgtaacgccctactatgtgacagggactgctagacatcctgggcacacaagacaagacaagacaagacaagacagatgcagtccttgacttcacatgaccttcagtccagcaaaggactccacaggaacctcacactaacctctcccaagtacacaggtatccctccagcaactatggactaggcctacacttcattcatcttctctgactccattagcagccctcaacatctgcactacttgtacgtcacaaagtgaattcttttgtcctttggttggaagagaccttaacaatcactcagagccacaagagaacctcctctaaatacccctcagtgatccaagtctttcttgactacttctggtggagaggactcaaggccctggagtagtttttaaaatcaatcattacttaacattgaagaaatatataatttttcttttcttttcttttttttttttagacagggtctctctctgtccacccaggctggtgtgcagtggcacaatcacggctcactacagcctcgacttcctgggcttaggtgatcctcccacctcagcctcccagatagctgggaccacaggtgcgagccaccacacctgctaatttcagggtttcaccatgttggcatggctggtcttgaactcttggcctcaagcaatctgcttgcctccgcctcccaaagtgctgggatgataggcatgagtcaccacgtccagccaatcatttttattgtctacactaacagacttttttcctgaccattctgtatgaggtgtgttactgtgttgaatctgtaagggggcatatttcctaccagaaggccattctatttttggacttttctaattgctagaaatgtttacaccttttaaacccagatctgcctcccaatgcttctaattcggttctctggggccatgtaaaaaaacaaaaaacaaaagaaaacaaactcaaattctgcttttatctgactggcctcaaattatgaggtctgctgtgttatacaccttctctaggctaaacagtcccacttccttcaactgtgcctcactccaactgtctcctaaacatcctgcttattctttcactaagactttcactaagactaaagtgtctcccacagtgagtgcccacgtgacctggtagcagagcagagagtagaccattccctcccatttctatcggggatactcaattttaataatagacttaacagcattactgttgttgtccccaccttgcactactgataaactgtgagcttcttttttccttttcttggggggcgggggacagggtcttgctctgtccctcaggctggagtacagtgacgagatcatggttcactgcagccttgacttctcagactcaggtgatccttccgcctcaacttcctcaggagctgggactacaagcacgtgccaccacacctggctgtgtgttctgtagagacggggtttcaccatattgccccagttggtcttgaactccagttcaagtttaaggaatcctcctgcctcagccccccaaagtgttcggactacaggtgtgagccactgtgccctgccaattgtgagcttctaatcaacaaatccccaaattgttttcacatatgttgctaaatcctatctccctttatggagtacaagccctccaccaactattccctttcacatcttttccttcaccaaggtcttctccccatgcctgaagaaatccgattatttaccattgtgctgcatgctacatgctaagtgtggctgactttttggaccagggtagggttttacattctttcttttctgatttcatcttgtcatttacttctccccattgcaacctattaagttctctttggatcctaaatttttcatctaagaatgcattcccttctcaggtttatgttacatactttttgttgttgttgttgttgagacagtctcggtcttgttgcccaggctggagtgcaatggcgtgatctcggctcactgaaacctctgcctcctgtgttcaagtgattctcctgcctcagcctcccgagtagctgggattacaggcacccgccaccatgtccaactaatttttgtatttttaatagagacggagcttccccatgttggtcaggctggtctcaaactcctgacctcaggtgatccacccgcctcagcctcccaaagggctggaattacaggcgtgagccaccgtgcctggccatgttacatgaattttatcagttggttttatttacaattcttaatatctttctcccattaatctgtcgtgtttttttctcctaagtaagattcttgaggggaggcactagtgtgtgtgtttgtgtgtgtgcttaaaataaaatctatctgcagtatttaacatgcactatggatacctgaacaatgtggatgagtgatcgtgggggtcagatggcagcctcaggacaatcccagaggacatcacggaggtggtgcggccatactgcctatactgtgtcaatcatgctccccgaagctgtgcaacacagacacctggacacactcggagatgctaccttctgtttggggggtgctcctcatgggggtttggactcaataaggaatagggactcctctttgacaggctgcctccagtttctcatgtgaaaccagataccagaagaagccacgctctgggcaggtcttaactccatggaggctgttgtaccaggtcaaggtaaaatgtacctcctaagaagtgacatttaatgatcttcaaagcactgatgtcatgctttgaaaaaaaaaaattacatccacatctgaagaacccccacagcatattaaaaaatgtagtatgcagacattctctgagatttgggctgaggtagaaagccattttaagttgcattttcaggttctatgtttctggagtcctgaatcacaaacatgacccatgcctcatagttggagacaagagaagctttgttaacgaaaacgaactagcctatccatagctcgggataacgtgtaagtcagcaaatggctgccatacagaaccagctcaatcagtgtcagttctcccttcttcacatctgaacatgaaaaggcattttttcaaaaccaactgtatcacaatcacacgctgagcttattaaaaatgcagattcccgaactccactttttttctggagactgggtctcactctgtcgcccaggctggagtgcagtggtgagatttccgctcactgcaacctctgccttctgggctcaagtgatccttccatctcagcctcctgagtagctgggactacaggtgcctgccaccatgcccaggtaatttttatctttttttttttttttttcgagacagtgtcttgctttgttgcccaggctggcgtgcagtggcacaatcttggctcactgaaatctccacctcccagatctaagcaattcttctgcctcagcctcctgggcaacagggattacaggcaagtgccaccatacccagctagtttttgtattttttgtagagatgaggttttgccatgttggccaggctagtctcaaactcctggcctcaaatgactcgcccgcctcggccttccaaagtgttcaagtacaggagtgagccaccgtccctggcctaatctttgtattttttttagagatgggttttcaccacattggccagtctgggcttgaactcctggcctcaagtgatctgccctccttcacctaccaaagtgctgggattataggcataagccactggtgcccgactttgtttgttttctttttacctaacactactccttggctatggattccactttgaattcaatgaattagtatttcttgagataggaccttagaatgtgtacttttaaacattttattctatgagacagggttttgctctctcacctaggctggagtgctgtggtgtaaacacggctcactgcagtctcaacctatcgagtagctgggaatacaggcgcacaccatcacatccagctaatttttaaaaaatgttttgtagagatggggtctcgcgatattgaacaggctggtcttgaactcccaggctcaagagatccccctgcttcagcttcccaaagtgctaggattacaggtgtgagccacagcacctggccagaatgtattgcacaggctggtcttgaactcctaggctcaagagatccccctgcttcagcctcccaaagtgctgggattacaggtgtgggccacagcacctggccagaatgtgtgtaagtgttccaggtacttatgaacactgagttttagaattactgctttaaaggatggaaggttaggtcaaagtggtcacaattttactagactcttcaaaatgcaactctatttttcaaaggtgcaaacactactactatctatatattttttgagacagggtcttgctctgtcacccaggctggagtacagtggcgtgatcaaagctcactgcaaccttgaactcctggactcaagtaatcctcctgcctcagcctcccaagtggctgggacgacagtcatgcatcaccatgcccagctaatttttgaatttttatttttgtagagatggggcctcgctatgctgccaggactggtcttgaactcctggtctcaagcagtccttctgctttggcctcccaaagtgttggggttacagccgtgagccactgcacccaacctactttatatttttcatgatacttttaggatctagaaatcctctgcactctttgatgcagttactacatccagatgatgtagatgaggaaactaaaattcaaataaattcaatgacattctcaggagaactaagatccaaagccagataaaatgacttcctcattcaaggtttaccagctcaccagcgctaccttcctggaagagtgccatcggccttccgggacgtaataaaacctgctgcatgcctcactcacccttcgcagccacagcgaacaccgagcgaatggttactacaagccaggcactgtgccaaatgctttacacgaaccaactcgtgatccccacaacctcatgaagtagatactgtcactgcttcgattatagaggtgaggaaattaaggcacagagaagtaacttgctcaggaaatgcagccagtaactgcaggggccggactgttctaactgccacagctctccatgatccagaacattcacaggtgtttcagagaccctcaccatctccccaaggagaaagctcttctcttgcctggaaattcacagaagaagagaaaaaggcagcctctcagagctgatttcttgaagactgaactcttctgggcatggtgcactcctcctgggtgggtgacacgccacagtctaggacaagcagggcctagtggaacgacagtgtcgtggcctcctaacttgtgtgctctcaggcaaattactgagccctgtctgcaagatgctaataactctgaagatctatattcctagtcctttacaaaattttattataaattgacaatttatatttgtgtttatttacaagggtacaaagtgatatattttatgaatacaatgtataataattaaacccagctaattaacatacccatcacctcaaatacttatcattttattgtggtgagaaaatttgaaatttactcttaaaggaatttttttttcttttagacagggtcttgctctgtcacccaggctggagtgcagtggtgtgatcaagactcactgcagtcttcacttcccaggctcaagtgatcttcccgcctcagcctcccaagtagctgggactacaggcgtggaccaccacatcctgctaatttcattttttttttttttttttttttttttagagatgaggtctcactatgttgcccaggctggtttgagctcctggtgtcaagtgatcatcctgcctcagcctcgcaaaatgttgggattacagttgtgagtgaccacgtctgacctcttaaagcaattttaaatgtacagtgctgtatttttatgctcaccatgctgttcaacagatctcagaaaaacacacacccatctttctcccatggaactgacgctttgaaccctttgaccatcatctccccatttcccagcctctgtagccaccatcctactctctgcttttatgagctggactctttcagattctacatgtaagtgagaacatatggtatgtgtctttccgtgcctggcttatttcactcagcataatgctcttcaattccacccatgttgctgaaaacaacagaatttctttttaaaggccaaatagtactccattgtgtgtatgtcccaccttttctttatccattcatctgttgatggacactcagactaattccataacttggttattgtgactaatgctgcagtgaacctgggagtccagacatctcttcaaccaactgatttcaaatcttttgggtgaatgcccagaattgggattactctctttccattcttacaggtttctgtgattctgggcagtcatcttggaaaggaggaaaggatcgttctgccactgagcttgatggaggagctcagctctgtcataggggacagtgccaagagctgggcttggcctttttggaagggttaaagattcagaatgcgaactaacagtgagaggctagagattactctgatggaaaagggtggtataggttactctcatatgataagccactcaggaagacttggagggttttatggaatcattagcacagagctcccctctggccacagagcagaggaagaaacagcggaccagtttataaagctacagagcggaaaatttctgttgctgtccaaactaagtttttggctttctgtgaagcttggaaagacttatactgatgttttaatcacctgtttagtgttctgaggactcttgtcagcggcctcactgagcttgctccagcaggcagtggggaacggctggctctcgccccacgctcttcttgtgagctgtttctttcccatgaccacctccaacaccctgtagctcccattgggccacttggagggtataagccaaacctgtgagccctataggagactgagcacactcttttgggctaactcatcaccggatctaaagtcaggaaagaccccttaataagagccttggtgcaaagaggtaagaagtcgtctcaagattagtctgccagcaacacctctgtgatggcacagagaaagcaggcttgacttccaggagaatcaccatcaacacattctttttttttttttttcagttggaatcttgttctgtagcccaggcaggagtgtaatggcacgatctcagctcactgcaacctctgcttcccaggttcaagtcattctcctgcctcagcctcccgagtagctgggactacaggcgcccaccacctcgcccggctaattttttgtatttttagtagagacggggtttcaccatgttagccaggatggtcttgatctcctgacctcgtgatccgcccacctcggcctcccaaagtgctgggattacaggcgtgagccaccgcgcccggccacacctggctaatttttgtatttttagtacagacagggtttcaccatgttggccaggcaggtcacgaattcctgatttcaagggttccgtctgcctcagcttcccaaattgctgggattacaagcttgagccactgtgcctggccaccatccagacattctaaagcacttgggtatttattgtgaaaagaagtcctcacaagtgacaatgcatactgaacaaattcagggcagggaaagttctagaaagaaaaacccatgagcatgccagaagctctttaaagaggttaagggggttgaaaaaaaaaaaggttcagggtagtggcaggtagagcaagttagcatcttacttcctctgcaattttcattgatcacgctttcttggtggcctaaatatcccattttactgggaaagctgtggtgtagatgaagtggtgacagatggttactaggaattatgttatttcatttgattatcatggtaatcctgtgagacaggaagaggaaactaaagctcagaaaaagcaagtgatgaagtgatgaagctgggctttgaacccagatttgtcttactccaaagtttgtgctcagttcattatattataatatggcctcttatgaaggtaatggcactttcacaaagagtatagggaaaggtctctacttcaagtcatctttttttttgggagacaaggtcacactctgttgcccaggctgagtgcaatggtgtgatcttggctcactgcagcctcaacctcccaggttcaagtgatcctcccacttcagcctcctgaacatctaggactacaggtatgcaccaccacacccagctaattttttttttttttttttttttttgtagagatggggtctcaccatgttacccaggctgctctcaaactcctggactcaagcaatcctcccgcctcgacctcccaaagtgctgggattacaggcgtgagccactgcactcagcctacttcaagtctttctcacttaaaaaatattacactcagccgggcgtggtggctcacacctgtaatcccagcactttgggaggccaaggtgggtggatcacctgaggtcaggagtttgagaccagcctggccaacatggtgaaacccaatctctactaaaaatacaaaaattagccgggcgtggtggcaggtgcctgtaatcccagctacctgggaggctaaggcagaattgcttgaacttgggaggcggagagtgcagtgagccaagaccgcgccactgcactccagcctgagcaacaagagcaaaactctgtctcaaaaataaataaataaataaataaataacacttgcccagactcagcagtagcctaaaggccctcaggacagaagaaacagttctgacgaatttgcctttagaggaacacaaattgaatgggtgcttggctaagctacaggcaagaaaagaaatactgaaatttaaaatttctcaggatacctgccctaaaaagagttctatcacttagattcatttcatttcactggacataatatgggcaaaacctcagctgaatacttgatgagctgaatgaatataggaaactagtaactgccagatgttaagttttaagacctatatgtgggtaacctctgaaagttgtctgcaccacagccttgaacttttctactgaatgtaaagagtaaagtccatcatgaagacaggaaaatggaaatcaaagctccctcctgatacttggcacccaaaggctccacaaatctgtcaatccaagtaacttttactttgcaagcaacagggtgtgttacttatctggcaacgcttgatcttggagaaggtatgaaggaggagaagagagaataatagtttacttctcagtggaaaaaccaggcttaaggaggagatactgatttctgattgagttctcagggagaccttctctgccatagaattttccctttccaccccatcacttttcttcttgtctcttttcttactaagggaagtttcttcaaactgctgtctctggctcaaagttaatttccctttggccaaagcactctgcacatgccattgttccatgccctgttatgccagagttcaagcagataagccaccaacgtgccttttaataaaggaagggaggggggtctctcaagggaactctgcttactgggggaaaagagagtcctatagcagcaaaggcacatactaccattcctcggtgacctcagaggagtctatttacaaaggctatagttagagaggaaagggcaagaaggaagggaaagagagggagaccatgaccagagaggtcttatgtcccacaggaataactccgaggacaagggaaaggctgtcctgtcacaagggcaaaattaaccagacccagccgattatgagagagggaaggaggatgctgggaacatgaagggggcaaagcttacaggccactacatatatgggggaatgcaggaggaaaatgtttcaaagctgatgacaaggcagacaggaaacctccgtgtccctgctgacaggaaagaaagagtgaaagaaattctgggatcttctctctaggcaggaattttttttttttttttgagacagagtctcggtttgtcgcccaggctggaatgcaattgtgcgatctcggctcactgcaacctccgcctcccgggttctagcaattctcctgcctcagtctcccaagtagctgggattacaggcatgtgccaccacgcctggctgagttttgtatttttagtagagacgtttagtatttcagtacttagtagtttagtattttagcctgacatgttggtcatgctagtcttgaactcctgacctcaggtgatctgcccaccttggcctcccaaagtgctgggattataggtgtgagccactgtgcccagactctatgcaggattcctaataggcatgtgaagttccctgtcttcccatgggtgtgctgacagctggaaatcctgccctttgggtcaggcagggcagggatctagacctctcgggagttcatgaagaggttcactaaggactgaaaccatgatcccaaacacaaatggggactgtcatttcctgttgggtttccatgctgtaaaaaagtgggggagaaatgccagctacgaagtactatgtcttctatggaaaatggagtatgcagtgtatctggctcctggttctgacttgtaaatctaagtgagaactagttgttagctgctagaggattatagtgttaaacagacattctaccacccaacctgccagcctttctgctcactgtctctgggcctctaggtagctgatgacacagttgtcttgagcctccataggaagggcagtcttgggctggggcagctcctctgggcactagttcactgctctgtgttcttaaacagctctgatggaacaagccatctgtgagggttatttaacttggagctggaagagggtgaggatgtggaaaaaataaactgaacagccaatggatggggccagagagagagagaaggcaggtggcatgttcatgggactgcgtgccagggccaagcggggtgggactgcagaaaggaatggtgccgaaaggaggccagcatgggaggggctggaacacccaggacagcagaattttatttccaaaatggtattttgttgttctccttcaagggcacccaagtcctcactttagagttctatttctgggagaatcttggaatagtgtaactaagcacacctgcctcgccttctgaaaagctacctgaaccttgcccaatttctgagccttagcctacaagataaatctaacaggtttttttttgttttgttttgttttttacatccaatgcctcaaaataatggcaacagctaagtgggtagaaaacggaaatgaaggattacagagaatttgcatgaattacagaaaacagctatagaaactacaggatgatccagaaggagacatgggaatctgatgtgtgactgagttgtaactggacctctttggagtcttcttagccactctccaatccccagcgtccactatgaaaacacatattgaaactttcatttttaaaaatcttgccaggcgcagtgactcacgcctgtaatcccaggcctttgaaaggccgaggcgggcgggtaacttgaggtcaggtgttcgagaccagcctggccaacatagtgaaaccctgtctctactaaaaatacaaaaattaaccaggcccacgcctgcaaacctgcaggtgcacacctgcagtcccagctacccaggaggctgaggcagaagaattgcttgaatctgggaggcagaggttgtagtgagccgagattgtgtcactgcactccagcctgggccacaaagcgagactctgtctcagataataataataataaaaaaattctgagccaggtgtggtggctcatccctttaattccagaactttgggaggccaaggtgggtggatcacctgagggttaggagtttgagaacagcctggccaatacagcgaagacccgtctctgctaaaaatataaaaaaattagtcgcgcatggtggcgggcgcctgtaatcgcagctactcgggaggctgaggtggtagaatcacttgaatccaggagttggaggttgcagtgagttgaggattacaccactgcactccagcctgggcgacagagcaaaaaaacctaggcattttcacttattttatctcatttaatccttactaaaatcttatgaaataactaatgtcatccccatttttcagagagtaaactcaaccccagagacaatacattaattatctggcgttttctcatgactagcacagagcataataaaggctatgacatctatctagaacaggaagatgtatttttctgcaggttgtcctggcaaaatagcattagagttgacagtatctcatctgatccattcctgattaccaagtctatgtagtatattctcacaggatttgaaaaagagaccaaaaagctgctgttagaatatatgtctctctttttttttttgagatggagacttgctttgtcacccaggctggagtgcggtggcacaatcttggctcactccaacctccacctcctgggttcaagtgattctcgtgcctcagcctcgtaagtagctgtgattataggcgcgtgccaccacgcctggttaatttttgtatttttagtagagacagggtttcgccatgttggccagcctggtcttgaattgctggcctcaagtgatccgcctgcctcagcctctcaaagtgctgggattacaggtgtgagccaccgtgcatggcctttctcattctttattaaatattttcaaggcagtagattaagaataggattagagacaggaatccaataactacgtgctgcttactctacttttgaagaacacatatagacacgcaaaccattataaactactttgaagtatagtttcagtgctttatactgacaaaacagagacaaaatttctggaccagcctatactagagaaacctatatacaccctaaactttaaaaaaattgacaacacaagggcagacgcagtggctcacacctgtagtcgcagcactttgggaggccaaggtgggtggatcacctgagctcaggagttcaagaccaacatggcaaaactctgtttctactaaaaatacaaaaattagccaggcgtggtggtgcacgtctgcagtcccaactacttgggaggctgaggcatgagaattgcttgaacccggaggcagaggttgcagtgagcagagattgcactactgcattccagtatgggcgacagagtgagattccatctcaaaaaaaaaaaaaaaaaaaaaaaagacaacacagaactaaaagctgtcacttaattctgttacttaagctaaagtcactcttgctgctgacaaagtaccaaaggagttcaatgagatatggtggcatctcagaatcaagtaccaggccaaactgaagccaaagctgcttagtaacgtggagttcagaaacatggcacatggtgaaaaaaagcaatacaaaggccgaattttaaaaacaaaaccttcccacctttgatttttaggccctgttgcgagtttctggtatgttcttcagagatagttctgcatttactgacatatgtgattaactacgagctctctctatgccttttatagatacatttatgtaagtggtgatatactatgacacacgcacacgcacacacacggtattttaaagataatcaacatcatttgtgaagcacatttcatgccaaatactaaggatcatcaacaataaagcactctgtgttggggggactgatggaaagatctggcggaagcagcaaaggaaagcagacggaagaaagaccctgatgaggtgctcaagtccatcagtcatcatcaagtccaacaggcctgggagaggtcagcaacaacagtctccccagccaagcagggtctcaaatgacaaaaagttgggcaaaataatgtgcaaagtatatacatgtgctccagtctgcacgctgcccagaaagagctcccaccccagaggaatcaatatcaggagggtcatcaacaaatttgaaggccagaaacaaagagtgctatatatgtatttactgtgaaaattaagcggctccaattccatttcgatgtgtaggctataggtgttacggcaagagctgcctggtacatctgaaggccgctacgcccaccttcagtgccagtttccttatcagaggagctcgtagagcctcacagaacacaaagtaagatatctgaggtgtttcaggctgatctcacagtctgagttctaaatgtattctactgaaattcaataaatatttattaagcacatgctatggtgtggcaggccctattcaaaccaccaggaatacagcagtgaataaaacaatgctcctgttcccatggaacttaaaacatttttctgagactgagaatcaaataagcagacagtagtgggaagtactgtgaaaaaaagttgggtaagggagacagagagcggcagggtggggaagagtattgctattttatataagatggtgaatagaagaccctaagaaaggtaatatttgatcagacttgaaggtgcaagccacaaaaaagagaggtcctttcttatctcgctcaaagaggtcctctgagatcacaggatctcgctgttgcccaggctgcagtacagtggtgtgatcatagctcactgcagcctcgacctcctgggctcaagcgatccttctacctcagcctcccaagtagctgggaccacaggcgcctgccaccacgcctggctaattttttatagaaacggggtctccctatattgcccagactggccttgaactcctaggttcaagggatcctccggccttggcctcttaaagtgctgggattacaggcatgagctactgtgcctggcccgaaaggtccttagagcgggtttcttgggtggtggctggagcatcaaggagttccttctctgatcgaagggcttgttagctacacagtttgaaggaaggagaacaggcttttccagctcagcctggtgagaggagaggcctttgagagtttatgcagcttgcacacccgctccatgcagtttctggaaagtttccatcacagatgagagttttacgttgaattttaagtttgaccacaaatatttaaacttccctggaccacaaatacagtatcttccctgtggtttatctggcagcaagtacatatttacaaatctctatatgtctgcctgttatttaaatttcttacagaagtgccaaggtctttagttgtgatttatcccctccccctccgtactggtaggtatagtcttcattaggcctaactcttgggaaaaggaggtatctttacaattgaagcttagaaatcttcctgattaaatttcctattaccgcttccctcttaaaaaaaaaaaagtcggccgggcgcggtggctcacgcctgtaatcccagcactttgggaggctgaggcgggtggatcacgaggtcaggagatcgagaccatcatggctaacatggtgaaaccccgtctctactaaaaatacaaaaaaaaaattagccaggcgtcgtggcgggcgtctggagtcccagctactcgggaggctgaggcaggagaatggcatgaacccgggaggcggaggttgcagtgagccgagatcgtgccactgcactccagcctgggtgactgagcaagactctgtctcaaaaaaaataaaataaaaaataaataaataaataaataaataaataaataaataaataaataaaaggcaatggtctgttccaagttcttgcatttgaattgaaatgtaaaaattgaatttttttggtgcttttttttttccactagggaattgagaacaaaacttaaagctaaataaatctgcatactttagctatattaaaaagcaaaacagcaaacaataaaagccaggtgtaatgagctccaaacttttttttttttttttttttgagacagactctcactccgccacccaggctagagtgcagtggcgcaatcacagctcactgcaacctctgcctcccaggctcaagcaatccccctgcctcagcctcctgagtagctgggaccacagacatgcgtcaccatgcctgactaatttttgtatttttggtagagatggggtttcaccatgttaaccaggctggtcttgacctcctgagctcaagtgatctactggcctcagcttcccaaagtgctgggattacaggtgtgagccactgttcccagccttttattttcttttttaagagacagagtcttgctctgtcacccaggctggagtgcagtggcatgatcaaggcttactgcagcctccatctcccagcctcccaggctccagtgatcctccccgcgacttcagcctcctgattagtgaacagctagcattgcaggcgtgtgccaccatgcctggccaatttttttttttattttttgtagagatagggcctatttgcccagattggactcgaactcctgggctcaagtgatccacccgcctcggcctcacagcgtgcttgggtaacaggcatgagccactatgctgggcctaaggcccaatttctaaatgaatactcatttgcttaccaattcctgaacattataacatgcactagggttacaaagaatacagcacacatccctgctctccagctgggtcttgaacaaagccggcttgggaaagggtgctggctccacgagagcacacaattcttaaatgggtctctgggttatcaggactgctttctcttacacagctgccaagtgagctatatggcattcttatcaaatgaaagcaaacagctagatcatctaaaacccatggcctcaaaaccatcactcctactccattctggagatcttattattttcacctttcctttcctggacctttggggtatggtccctattaatatccagcctacagggttgagacccaacacagaaagacttaaggagcatcttcatgaaatcactaaattatctcctcctgagtgtcacacgagagtggtggaactagttatgaagtaacaaacccatgcatataaacccatgaaagcacaatctaagtccaatgcctacctttatcaaatgaacaatgaccttccaagtatttcaatctggaaggctagaaactcatttcttaaaaactagcattgaggccaggcacggtggctcacgcctgtaatctcagcagtttgggaggccgaggcaggcggatcacctgaggtcaggagttcaagaccagcctggccaacatggcgaaaccccgtctctactaaaaaaatacaaaaattagctgggcacggtggcgcatgcctgtaatcccagctacttgggaggctgaggcaggaggatagcttgaacccaggaggcagaggttgcagtgagcctagattgcgccattgcactccagcctgggtgacagagtgggactccatcccaaaacaaaacaaaaaatactccccaaaatgaaaacaaaactaacattgatttgtttaatcagaatgacattaagcatatgcttctcttctatccttccagtttcccattgaaatgactaaaaataaataaataaataaaaatgaagaaagcatccatcagtactaggcaaccccataccagaaactttgggaaactgtctgcaagtctaacagtgggtggaactggagtgagaaaaaggacaactgatgttcaacccttttcaggctgagtaagaatacagatgagaccttagcggcagtaccacattaatacccttatcttggggcaactaagacaagaaccaaggtgggttgtgatgcagttggaagggcacaggggccaggcgcggtggctcacacctgtaatcccagcactttggggggccaaggcgggtggatcacctgagctcaggagtttgagaccatcctggccaacatggtgaaaccccatctctactaaaaatacaaaaatcagttgggcgtggtggcaggcgcctgtaatcccagctactcaggaggctgaggcacaagaatctcttcaatccaggaggcggaggttgtggagtcgaaatcgtgccactgcactccagcctgggcaaaaataaaataaaataaaataaaataaaataaaataaaataaaataaaaaaatgaaatgaaatgaaataaaataaaataaaataaaataaaataaaataattaaaaaaaaagaagggcacaactggatcctaccagggttgatgggaaacacagcaggtatttgtggctgctaactgatagctggtgtgggtggccagatgaggcagaaggaagacacagctgaggaggatgggttctaataaaggcaaaaaacccagaataacattaggttgagaaacctagtctactctagcaaacagagtgtttaacactggcagtataaatcaaatgttcctcttttccctttgtctgcacctgaaaatcttaagaggcccatctaaactctcaatatgaacaagtatagactggccctagtaaggatgaaaaaaaaatcacctaacatataaaaaagtattgcagttcaacaggataccaatctaaggaattggtaaacctctttctagaagagtcaatgtgaaaacaggcacaaacttcggaaactttcaaactaatatttaaaaatttaatagtaatggcacaagcagagataaatagacctttggggaagaagatacagtatagaaatagacccaaacatatataatcatctgacttatgacatggcatcattgcagttcagtggggaaaactgatctttcaataaaatgaaccacagacccaagtgtgaatggtaaaataatatagtttcaagatcaaaatacagaagaatatcttccttccaatatgttgcacttggaataggcaaacatttctcttttttgcgggggaggtgggaagtcaggtttttgctctgtcccctaggctggagtacagtggcatgatcatagtttactgtagcctcgaactcccgggtccaagcaatcctcctgcttcagtagctaagcgtgtaccaccatgccagggtaattatttatttaattttagagacagggtcttgctatattggccaggttggtcttgaactcatggatggaagcagtcctcccaccctggccccccaaagtgcaagaattacaggtgtgagtcactgtgcctggccacatttcttaaataagacacaaaaagcactcactaacttttaataaaaatatatctatttattatttcatttatttatttttgagacaggatctcgctgtgttgcccaggctagagtgcagtggcatgatcttggctcactgcaccctcaactgcctcggcccaagcagtcttcccacttcagcctcttgagtagttggtacatatgggtatgagccaccctgcccagctattttttattttttattttttttgtacaggcagggtcttgctatgttgcccaggctggtactgaactcctggcctcaagggatcctcccgcctcggccttccaaagtgttgagattacaggcatgagccactgtacctgaccaagaaaaaattattttaactaagatttgtgttcataaaaagataccattaatactgaaaagatggctgggcatggtggctcacgcctgtaatcccagcactttgggaggctgaggtgggtggggtcaggagtttgaggtcaggagttccttgaggtcaggagtttgagaccagcctggccaacatggtgaaaccccgtctctactaaaaatacaaaaattagctgggtgtggtggcgggtacatgtgtaatcccagttactcaggaggctgaggcaggagaatcacttgaacccaggaggtagaggttgcagtgagctgagattgcgccactgcactccagcctgggcggcagagcgagactctgcctcaaaaaaataaaaaccctgaaaagatgaaccacagactgcgagaagatattttcaatacttctatccaacataggacttatattcagaatactggaaaaaaaaaacaccctataaatcagtaagaaaaaagacaaagaatccaagaaaaacatgggtaaaaatcaggaacaggcactccccagaagagggtattcaaatggccaatagcagaagaaaaggcactcaatatcattactcatcagggaaatgcaaattaaaatcacaatgagaacaacaacaaaaaaagaaagcaaaacaaaacaaaaatcacaatgaaatacttctagacagtcaccagtatggcttttaaatttttttttttttttgagacagggtctctctctgtcgcccagtgtgtagtgcagtagcgtgaacatggctcactgcagccttgacctcctgggctcaagtgatcctttcacctcagcctcccaagtagctgggaccacagatatacgtggtcctagcaaggatgcctgctctcaccatttcctttcaactcactagtggagatctcagacactgtattaaggcaagaaaaaaaacgctgaaagcataaaaatggaaaagaactgcctctgtttgcagatgacatgattgtttaacacaaaaaatcccaaataatgcgcaaataactactagattaaattctaataaaaatgtctttaggattgaaggatacatcaatatacaaaagtcaattgtattttcatattctagcagcaaaagactggtaaatacaatttagaaacaattccatttataatggcataaaaaataaaatgtatttaggaataaacttaacagacaatgtataagacctgtacagtgaaaagtataaaagacctaggtaaaaggctagctatactatgttcataaactagaaaaatgttgttaagatgtcaattttctcaaaactgatacgtaaattaaacttactcccataaggattctagcgtttgtcgtaagaatttttaaataaaacgaacaaaaagaacagaaagcatgacacccctgcttatatgctcatctgatatttgaaaaaaagtaccaaagcaatccagcagaggcaagaaatgccttttcaataaatagtgctgatataacttgatatccatatggggggaaaaaagttttagttcttatattacaccatatacaaaattaatttgaagaccaggcacactggctcatgtctgtaattccagcactttgggaggccaaggcagggggatcacttgagttcaggagttcaagagcagcctgggaaacatagtgagaccccatttctataaaaaattaaaaaattagccaggtgtggtggtgcttgcttatagttccagcttcttgggaggttgaggtgggaggatcacttgagcctgggaggttgaggctgcagtgagtcatccctgccactgcattctagcctaggtgacagagcaagaccgtctcaaaaaacaaaacaacaggaatgggcgcagtggctcatgcctgtaatcccagcactttgggaggctgaggcaggcagatcacttgaggtcaggagttaagagaccagcctggccaacatgatgaaaccccgtctctactaaaaatacaaaaattagccaagcatagtggtgtgcacctgtagtcccagttactcaggaggctgaggcacgagaatcacttgaacctggggagtagaggtagcagtgagccaagatcgtgccactgcactccagcctgggtgtaagagtgagactctgtctcaaaaaaaaatttatttccaatgtctcatagacctaaatataaaagctaaatctagatagcttttttttttttttttgtctttttaaattttgagcaacggtcttgctctgttgcccaggctgaagtgcagtggtgcaaacatggcacactgcagccttgccgtgcacggctgcaagtagctgggaccacaggtgtaggccaccatgtctggctgattttttaatttttttgtagtcatgggggtctcactatgttgtccaagctggtctcgaattcctggactgaagggattctcctgccttagactgataaagtgttgagattataggcatgggccactgtgcctggctcaatgtagctttttttttttttttttgacatagaatctcgttctgttgcccaggctggatggagtgcagaggtgtgacctcgactcactgcaacctccgtctcccggttcaagcaattctcctgcctcagtctgctgagtagctgggattacaggcacccacctggctaatttttttttttttttttgagacgaagtcttgctctgtcgcccaggctggagtgcagtggcacgatcttggcttactgcaacctccgtctcccgggttcaagcaattctcctgactcagcctcccaaatagctgggattataggcatgtgccaccacgcccggctaattttttgtatttctagtagagatggggtttcactgtgttagccaggacggtctcaatctcctgaccttgtgatctgcccgcctcggcctcccaaagtgctgggattacaagcatgagccactgcgcccggccataatttttgtatttttaatagagacagggttttaccatattggccaggctggtctcgaactcttgacctcaagtgatccgcctgcctcagccttccatagtgctgggattataggcattagtcaccgcacccagcccagaattatttattattattatttgagacggagtcttgctctgttgcccaggccagagtacagtggcacgatctcggctcactgcaacctctgcctcctgggttcaagcgattcttgtgcctcagcctcctgagtagttgggattacaggcatgtaccaccatgcccagctaatttatttttttttgagacggagtcttgctctgttgcccaggctggagtgcagtggcgtgatctcggctcactgcaagctccgcctcccgggttcatgccattctcctgcctcagcctcccaagtagattgggctacagacgcccgctgccatgcctggctaatttttttgtatttttagtagagaccaggtttcactgtgttagccggcatggtctcgatctcctgacctcgcgatccacccgcctcggcctcccaaagtgctgatattacaggcatgagccactgcacccggccatgtccagctaacgtcttatatttttagtagagaaacggtttcaccgtgttggtaaggctggtcttgaactcctggcctcaagcgatccacccacctcggcctcccaaagtgctgggattccacgcgtgagccaccgcgcccggcctccatacagcgcttagaggagaaccgagtagaagatcctcatcacttgggatttttagccctcataaagtaataaccataaaagaaaagcaggataaattgatttcatgaaaattaaaaccttttgcttatcaaaagatattaagaaaatgaataggtaagacacaggctttgtgaaaatattcacaaaacatgtatctgacaaattacttacatccagaatacataaggaactcaacaagaaaataactcaagaaaatgggaggaagatgtgaaaagatccttcataaggaagataggcaaaaaagtcagtaagcatatgaaaaagtatacaacttcagctgggcatgggggctcacgcctagcactttggacgagtgaggcaggaggactgcttgagcccagaagctggagaccagcatagacaacatagcaataccttgtctctacaaaaaattgtaataaaatgagcccaatgtggtggcacacacctgtagtctcagctacttgagaggctgaggcaggaggattgcccgaacccaggaggtcaagtctgcagtgagctgtgattgtgccactgctctttggcttgggtgatagagcaagaccctgtctgaaaaaacaaaaagcatacaacttcattagtcatcagggagatacaaattaaagccaaaaatgatatatcaccagtcaccacacacctaccagaaagaggatgtgaagcaatgggaagtgtcataattgttggagtctaacaaaatcatctttggaaaaagctgtagggcaggggtatcctgggccacgatggaagaaatgccttgggccacgcgtaaaatataatagcaccaactatagatgatgagcttaaaaaaaagcggggggcaaaaaagctcataatgttttaagaaagtttacgaatttgtgttgggctgcattcaaagcatcctgggctgcgtgcagcctgtgggccacgggttggacaagcttggtccaggggatctctaataaaaaatgcacatctaatctctgactcagcaattctaatcctaggcatttactcaagtgaaaacacatgtccaaaaacagatttgtgtacaactattcacagcaactttattcataacagctaaaaactagaaacagattcactgtcaaccagataaactgtgacatattcataaaatggaatactactcagcaataaaaaggagtgagctactaatatatactaatatatgtaacaacacagaggaatctcaaaaagattaagctaaatgaaaaaagcctttctcaagagcatgtacttattgtgtgattccatttatatggggttctaaaataggcaaatctaatcttggtggaaaaaatcagaacagagcttgcctctggggacagaggtggagataagggattataatataattatatgattatttatatatacacacacacacatatatgtatatatgtacatgtctgtctgtgtgtgtgtgtgtgtgtgtgtgtgtgtgtgtgtgtgtgtgtgtgtgtgtgtgtgtgtagagagagagagagtatcacccaggctggagtacagtagcatgattttgggctcactacagccttgacctcctgggctactaaagcagctctcccgagtagctgggtcaacaggtgctagccactacatttggctaatttttgtattttttgtggagatggggtttcgccatgttgcccaggctggtcttttcttttcttttcttttgagatagtctcactctgtcgcccaggctggagtgcatggcgcaatctcagctcattgcaacctctgccctcctgggttcaagcaattctcatgcttcagcttcctgaatagctgggattataggtgcccgtcaccacatccagctcatttttgtatttttagtagagacggggtttcaccatgttggccaggatggtctcgaactcctggctgcaagcaatctgcccgccttggcctcccaaagtgctaggattataggcattaaaaaaattatttaaaagaagaaaaaatggatggatgggtggatagatgggggaagagagggagagagagaaataaacagataacatgataagacaaatacagtaaaatgagaatcacagcatgtaggtactgggtataagtgagctcactggagaatgttcaactttgctgtataataaaatgttggaaaatcaatcacatcactaaaaaaataaaaagacaatatctggaagcagtggacctagtcagattaaaaaaagaaaatctgcatcaatccctgttgccgtcactaaacagctgtctcattagctattaaggaaaacacagtgtcagagggctggttttgccatgtaaaagaagtcttcagcttgctgtgtcctaacactggatcgcatataaatccccaaattctaaaggctagaaaggtttaaaatgtagatgcagcttcaatatccaggaggcagaactaagaacaagagatgtaaatctagctctggcagtgggaagcggggcggggggcaatggcgaagctaagttagaagccgcgagccacttagcctctccagctccagtagttctgtgtctggacgtcggccccatatactggcttaaaacctcaagatactagaggatctcaccagtgggaggtgccagagcagctgaaacatgtccctgtaaacaataaatgtttatctgggcagataacctggcagacagccttattctcatcttaggcaactcgaaactccacaacaggagactgagcacagaggggccccttcctctttgccacatgggtaggaagcagagatggaggtggtcctggctcctaccacatgaggggtggcagaaagccactctctgtaaatgccagcttcttccctgctggatgatggccagattcccttaaacacagagggtggggacagagaagtcaagtgaagcaacgctagacaatgctgccgcataacgctggctgctccaccgcagccctgaaggtatgaggaaaccctggcgtgttggcggctgcctcaggaaccgcgctggctaagggcttccccaggcctgggtgggaggcttgtcactgactctggccacacacataggcttggtcgccacctcggtcagtggcaaacagctgctgagaggggaggggaggagtagacccaggggtgctgtgtgctgcacagccaaatcttccacttctggagactccaaacgatattcctaagagccatatggcttaaaccccatggaggtaccaggaaaaaggcagtacgacggaaagaggcagctggaaggaaggaatggaagtgtgttaacggcacagaaactcctttcattgacaattaactgcaaacaattttattaccagttctgaaaccccaatccctaactgatgaattaaatcttggcaatggttattcctcccacctatacacttctgcccacactcttcttggaaggagagaggacagggaagtgaaacccacagtatgccaaaagggaagtcgagctctcattcataagactactaagctctctcccagggaagagaatggagatggcacaacaaaggctctttgctctgaaatagcaccgaagtgaagcccggcagagccagggtgtggatcttggatggagtgcagaggaggagtgtgtttgtgtatatgtttgtgctcatctggtttttgttgggggaaggtgacaattcattcttttgatttcattcaaacttagagctgcttttataatcacttcctgaaaacagagcaggaagagagtgctatctgctcaccccaccctccatttaacactgccccagcaatccaactatgtgctttacactgagaggccagcttcttgcctttggcagcactgaaggccagacattaccagcactcctgtgtacagctcaaggctccacccaaatcagactgcacacactgaatccaagaggaatatcattccagaacaacaacccaggagagagagaggagagctgagcaggctgggtgggacagttggggcacttctaacttctgacaccaggacacccaagtggttggcagaggcattttggtagtgcggtgacagatcaactgtagtgtgggaaatcccaaatgctacagtaaagaagttatctctgtacaaagaaaggggtgacaataagggtggggtacaggccacagggcagtaaggtagagaaatcagttttagcgaactggctaactactgggttagtccaattctgaatacacaagtaatattctagcctcttttcaggagagactgatgtagagtagtcatgggcaggccagggaacaaagttccatttctggcctaaagtggattggagggttcctccgcagagagtcgtaacagagtgtttatataaaaccccacaaacccactgctcctggctgtccaaggccaaaggcatcttcttcctggagagctgtgtctcttaccctctaggctctaagactccctattttacttagtcaggtttcctgtttactctgagacctgtgatctccccggggagtcattagagagaagctggggaaggggcagcagggagacggaacagtactaaggacacaggtcttccgcatcctaccattacttcttacatggcagaaaaacgaatggacactgaaagggggtttcctggtttaattaattatttacagcgtttattctttattttttgtttctaacgtgcaggcatctcttagactgctgaccctcaaggaaaatgcaattgggagcacaaccatgattggcaccgaaaggcattttttgttgctgttcccatgagaaccccatcagaatgatgaacaaggtacatacgctgctataaaataatcagcatctccatttggagaaggaatttcttttaaaaacacctcatttggggcactatggtctcttcttctatggaaataggaagaggcagaaggagttccattcctgccagagcagagtctactttttgctaattttttggaaaacaagaggttctctttggctctggagaaaaacagacatttccaaagggaaaatagagaaggagacagggtctgatgtggcaagacttgtagccctctcatatctccgagacagagataacctggagggaccgaaaccccctatttattcacccttctaaccatgcattccatacaatccagacatcctgagaccaatgatgattcagatactacaaggcctctgaagacgtcactacgatcctacgatttaggaagaaaagaaaatctgaggataattctcttgggcttgctggccaataggatgatgattagctacaatatggccaaacaaatttaaatttcctaaaattgaatataattaaaaacggagttccaataaatggaaaaacattctatgttcatgaattggaagacttaatattgttaagctgactacagtaaccaaagcaatctacagattcaatgcagttcctatcaaaatcccaatggcattttccacagatccataaaaacatcttaaaattcatatggaatctagctggatgcaatggctcatgccagtagtcccagcactctgggaggccaaagcgggcagattgcttgaggtcaggagttggagaccagcctggtcaacatggcaaaacaccgtctatactaaaaatacaaaaatcagctgggtgtggtggcgcatgcctgtaatcccaggtacttgggaggctgaggcacaagaatcgcttgaacctgagaggcagaggttgcagtgagctgacattgtgccactgcactccagcctgggagatggagtgagaacccatctcaaaaaaaaaaaaaaaaaaatcatatggaatcttaagggaccccatacagccaaattaatcgtgaaaaagaacaaaagttaaagggctcatgcttctggatttcaaaacttactgcaaaactatactaatcaaaacggtgtggtactggcatagaatagaacagaaaacctagaagtaaactctcacaaatacagggtcaactgacttttgacaagggtgtcaagaccaattccaatcttatggaaggaatagtcttttcaataaaaagagcttaaaaaaacctggatattcacatgcaaaagaatgaagctgaacccttacctaagaccatatacaaaaacaaattcaaaatggatcaaagacctaaaaagagctaaaactagaaaactcttagaagaaagcataagggaaaatctttatgacactggatttggcaatgatttcttggatatgacatcaaaagcataggaaacaaaagaaaaaaataagcagaccagacacagtgcctcatatttgtaatcccagcactttgggaggctgaggcaggcagatcacttgaggtcaggagttgagaccagactggccaacatggtgaaaccccatctctactaaaaatacaaaaactagccaggtgggcccctgtaatctcagctatttgaaaggcggggcacaagaatcacttgaacccgggaggtggaggttgcagtgagccaagatcaagccactgcactctggcctgggcaacagagtgaggctcagtttcaaaaaaaaaaaaaaaaaagcaaactggactttatcaaaattaaacacttttgtgcatcaaaggtggaaactcacaccagtaatctcagcactttgggaggctatggtgggacgatcactcgaggctgaggagttcaagagaagctttgacaacatggggagaccctatttctacacacacacgcacacacatgcacacagacacaaacatacatgcacacatgcgcacacatgcacacacacacatatacgcgtgaacacacgcgtgcatataattagctgggtgtggtggtacgtgcttgtggtcccagctacttaggaagctgaggtgggaggatcccttgggcttgggagttcgaggctgcagtgagccgtaatggtgacactgcactccagcctgggcaacacagagagaccttgtctcaaaaaaaaaaaaaaaaaaaaaaagacaaatattgcatgattctacttatatgagatacttacaatagggaaatgcatagagctagaaagtagaagttgccaggggaagggggaatgaggagttactgtgtaatggttacggcgtttggaatgatgaagagttctggaaatggatagtagtgatggtcgcacaacactgtgaatgtacttaatgccactgagttgtacacttaagaaatggttgaaatggtaaatccttttccccccctctttaaatagacactttattagatccacaggtgataaaatcccagagctactgttaggcacgtaaatatagaccctgctaaatatttaatattatcaagcttgtatgactcaagcatggttttggggccagcatcctcagtttctatcttcctatctctctgggtgacggcccaatcttgctgggcatgcaatgtcactatttctgttctcaattccagcagcttcctttcattcaacgaatacaattcttttactctgctcttttctaggttgaagtctaatttagtatctgttcggactttaatcacttcatccattacttgttttaactgatgtagtttgagttttattttctcacgttctgctctgagggctgaaaattcactcttctccaaagtaatcatatcgtttttcacattcacagtctgagacattatttgctgaagagcgatctcctgcttcatcttggtggccatatctttgtagacgatgtccacgttggcctccagtacctggaccaatgcagacacaatgatttctgcttgctgagtagcaaacccatggtcttccagaaagcacactaaggaacgagtgtcaaaggagagcttcctactcccagaagagctgaaatctctcctgtgctccagctgcaggtatccagcagactcctgcaggaagtgagtataggcaccatgctgaagcatgggtgaagggcgctggcagcagcagcgatgcccagggcaaggccccacaggcacatccacgcgccgctttgtccagccagtggggcggcatacccaaggcacgagtgctcccagtccccaggctgccggcacggagcagcggcggtcaagtgcagggagggcacgaaatggtaaattttatgttgtgtatattttaccacaattaaaaaaaatcatttcttcaggtagaccagccgcatttcatgtgttcaacagctacatgcggccagtagttaccatactagacggtgtcaagtagaacactttccccactgcagaaagtggtactggacaggatggctctagagttagattaaaaaccaccggattctgatgtcaacggtattaacctatacgccaatccaactgccttatgctgtattctgtatgccactatcctgccaatttgttattctaacagcctctccaagcattgtatacccactattgcaaacttgaggtcaggagttcgagactagcttgaccaacgtggtgaaaccccgtctctactaaaaatacaaaaattagctgggcgtggtggcgtgcacctgtaggcccagctacttgggagactgagacaggagaatcacttgaacccaggaggtggaggttgcactgagccaagatcgcgccacggcactctagcctgggtgacagagcaagactcaaaaaaaaaaaaaaaaagagagagagagaaagaaagaaagaaagaggaagacaaaaagacagaaaaagaaagaaagaaagaaaatggcatgcaagcagcagagtaaaaacctttaagaaaatgaaagaaatatgttatctcccatgaaacaactatgagtcaagaatatgctcattttgaagtttgggagagtacactggactattttaggaagaaaatgatagttttaaattagaattttattactgggctgggtggggtggctcacacctgtaatcccagcattttgggaagccaaggcaggcggatcgcttgagcccaggatggcgaaaccccatctttattaaaaatacaaaaaagtagccagatatggtggcacatgcccatagtctcagttactcaggagggtgaggtgggaggggcaagcccagggaggtcgaggctgcagtgagccataatcgcaccactgtactccagcctgggcaatgggaataagaacctattttaaaaaaattattaatgtgtaaccccatataaacaggttaaaaagaaaaactacactatcatcaacagattaagaaaaaatatttaataaaattcagcccttatttgtgatttaaagaaaatactcagcaatctaggaatagaagcgaatggtcttaacatgacaagatacacttatcacaaatctatgggccaggcatggttggtcacacctgtaatcccagcacttcgcgaggctgagacaggcagaccacttgaggtcaggagttcgagaccagcctggccaacatggtgaaatcctgtttctacttaaaataaaaaaatcagcctggcgtggtggtgcgctcctgtaaccacagctactcggcaggctgagacaggagaatcgcttgaacccaggaggtggaggttgcaatgagctgagatcatgccactgcactccagcctgggtgacagagcaaggctctgtctcaaaaaaaaaaaaaaaaaaaaaaaaaaaagaaatccatgacaaatagatttaataatgtaactttagaagcattgctattaaagttagaaacatagaatttctattattatggttaccattatagaacaagacagttcagtaaagttgatagatgtaagatgaagataaagaaacagcatttaggctgggggcgaggtggctcacatctgtaatcccagcactttgggaggctgaggcgagtggatcacgaggtcaggagatcaagaccatcctggctaacatggtgaaatcccgtctctactaaaaaatacaaaaaattagctgggcgtggtggcgggcgcctgtagtcccagctactcgggaggctgaggcaggagaatggcgtgaacccgggaagcggagcttgcagtgagccgagattgcgccactgcagtccgcagtccggcctgggcgacagagcgagactccgtctcaaaaaaaaaaaaaaaaaagaaacagcatttatattcataccattaatagttaactagaaaatatgatacttaaattagtaacaaaatctgtgcgagggttttatgggaaatattacaaaacatccttgaagggcataaaagaagacctgaataaattaacagtatatcatgttcatggatgggaagactaaatattgtaaatatggcaattgctcactggctcaatggaacagaacagaggactaggaaacagggaaacctgctttacaaaataaattccaaatggaacaaagacataaatgtaaaaccaaaatgaaaaccaaatattcagaagaaaaatttaaagtaaaactaaaacttttagaagaaaaatatgttggtatatattctttatgacctcagggtatgtaaggtttccttttttttcatgtaaaattgcaattactcttggtaatattttaacctaacaatcaagtggtttaaaaaaaaaaaaacatcaaataggccaggcgggtggatcacaaggtcaggagtttgacaccagcctggccaacatggtgaaacccgtctctactaaaaatacaaaaattagctgggcgtggtggcaggtgcctgtaatcccagctactcaggaggctgaggcagagaattgcttgaacccaggaggaagaggttgcagtgagccgagatcacgccactgcactccagcctggacgacaagagcaagactccgtctttaaaaaaagatcaaatgacaaactcctgcacagagataaaagtaacccttttaccccaccaaattataagctctggcttattattaaaacaattgatttttatatacaataaaactttaagcatatttgctattaaatgaatgccagtggtcttgttttaattaaaattttattatggaaaatctcaaacatatataaaaggagagactagagactagtgtaataaataaacctgctatcatcacctagcttcaacatttagcaatatatggccaatattgcacactcagaaatgattttttttttttttgagacggagtcttgctctgtcacccaggctagagtgcagtggtgcaatctaggctcactgcaacctccgcctcccgggttcaagcgattctcctgcctcagcctcctgagtagctaggactacaggtgcctggccaccatgcccagctaactttttttgtatttttagtagagactgggtttcactatataggccagggtggtcttgaactcctaaccttgtgatctgctcacctcggtctcccaaaatgctgggggattccaggcatgagcccccatgcccagccagaaaggatttcttaaataagacataaactggaaaggaaatggctgatttgtcacacaaatttttatgcaaagaaaatgctgtaaattaatttaaaattaaactataaactgggtgatccacaatgcacatagctgacaaagattcatattcagacttgcaaatcaataaaaaccaaccagctgggcacggtggcacacgcctgtaattctagtgtaattctagcactttaggaggccaaggcaggcggaccacttgaggacacgagttcaagaccagcctggccaacacagtaaaaccccgtttctactaaaaatacaaaaattagccaggtgtggtggtgggcacctgtaatcccagctacccgggagactgaggcaggcgaatcccttcaacacaggaggcggaggttgtagtgagccaagatggcaccactgcactccagcattgggtgacagagcaagactctgtctccaaaaaaagaaaaaaaaaaggaacttttgaactcgagcaatcctcctgccttgggctctcaaagtgtcgggattacaggcatgagccaccacgcccagtgaatttattttgcttatttatttctttacttctttgctctgtatccccataactggaatgtaaaatctatgaggtaagagactatgcctgtctcattcaccacaaaatccctagcactgtgaatgtctggtaaatagtaagtgttcaataaatatctaatgttgaatgaacgcgagaagtcaagcctcagagcaacttaacagcagatgcgtcaccctggcagagaagcccagtctacatgtggactgtcaattcaagtgccggttctcactgagttgtctatggggaagcggtgtgggacgatcagtggatggtgctcttacctgctacaactcataagagtaccagagggagtgggagtgaagagaaaatacaaaattgtatttggaaatcaaatttctattaacaagatatagaaactttgagcctctggattctctgcagacatctcattaattccccagcacaattttctcatgcaagttcctacatgaggtacaggaactaaactttctaaaaacctaaagcatgtcaatctcttttcctagcctcaggtctgagagagtgacagaagaagaaaggggacagtgaagagaaaaacaagaaggcacattaaatatactgccttttgttgttgttgagacagggtctcattttgtcactcagggtggtgggaacatagctcactgcagcctcgacctcccaggctcaagcaatgtccctgcctcactccccaggaagctgggactacaggcacgtgctaccatgtctggctaatttttgtatattttgtagagacggggattcaccatgttgtaatcccagcactttgggaggccaaggtgggtggattacttgaggccaggagtttgagaccagcctggtcaacatggtgaaaccctgtctctactaaaaatacaaaaattagctggacgtggtggcgcatgcctgtagtcccagatactcgggaggctgaggcaggagaatcacgtgaacccgggagacagaggctgcagtgagcgagatggcgtcactgcactccagtgtgggtgacagaacgagactccatctgggggggaaaaaaaagtttaaaaacgtaaaattcttagaataatatctaagacaaagcaagtcctcagtaaactgtagcttttactgtaattattcatctgggagagagagaacttatgtttaattctttggaaaaaatggcagccttcataacaagtcagagacaatatgaaacagtgggaaagcgctagactaaatatcaaaacacctcctggagcagagtttgctagttacctcccaatccagtcttcccttctttagcaaaataactttgatttttagctaagagtatgagtgcatgtgtgtgttttagacacagggtctcaatatgtcacccagggatgggatacggtggcatgatcatggcttactgcagcctagaactcctgggctccagtgatcctcctgcttcagcctctagagtagctaggattacaggtacgtgctaacacatgtggctaatagctggatacatttctgccagccaggtgaccatattttcagctttttctgcaggtaggatagccatgtgactcttgagatgtaaatagaacttttacgtaaaaccttgaagaagtctctttaaatatatggggcataccctttctgttttcttcctccattaagctgcctgctgatgctctactaaccatcttgggatgggaccacattgtaggatgttgtatactgagctggaggttccagtgtctgccaacttggggaagccaagtggtagagcccgaacactagccctggactgcctatgtctagactcttgatgtaagaggataaaactgtatgtttaggcctcttattcacctaaatctaatacaaaatgatagttctgggttctgacctagtattgtcatatgatctcagataaatcagtctaagtcttaatcttctcagctgtaaaatgtgataatgcccactttgggaggccgatgtgggtggatcacaaggtcaggagttcgagaccagcctgtccaatacggtgaaaccccatctctactaaaaatacaaaaactagctgggcatggtggtgcacgcctgtaatcccagcaatttgggaggccgaggcaggcgaattgcttgaacccaagaggcgaaggttgcagtgagccgagatcgtgcctacaacctgggagcctgggcgataagagcgagactccatctcaaaaaaaaaaaaaaaaaaaaaaaaaaaaagataatgcctcctagaactgtagtggaaatcaaatgaaataatacatcatgatagcactacggaaaatgctgatgtaagttttatctatgaaaatgaaacactgagattggaaaagcaagtgttaacaatgaaggcataaagacaaaatcactttttaagaagtctatgaaaggaggctgtttataagagtagacaaattccttatagaaggtcatgaaaattgatcatgttggagataatattctgaatcctgctaaatacactactaaattatctcagtaggaatcttgtaattttccactctttgaagtccatggcttctgatgctgattcattcctaattaaatggctttagcta
